(19) United States
(12) Patent Application Publication
(10) Pub. No.: US 2004/0168209 A1
(43) Pub. Date: Aug. 26, 2004

(54) Novel murine polynucleotide sequences and mutant cells and mutant animals defined thereby

(76) Inventors: Alejandro Abuin, The Woodlands, TX (US); Brian Zambrowicz, The Woodlands, TX (US); Arthur T. Sands, The Woodlands, TX (US)

Correspondence Address: LEXICON GENETICS INCORPORATED, 8800 TECHNOLOGY FOREST PLACE, THE WOODLANDS, TX, 77381-1160, US

(21) Appl. No.: 10/702,075

(22) Filed: Nov. 4, 2003

Related U.S. Application Data
(63) Continuation of application No. 09/880,687, filed on Jun. 12, 2001, now abandoned.
(60) Provisional application No. 60/211,232, filed on Jun. 12, 2000.

(51) Int. Cl. A01K 67/00; C12Q 1/68; C07H 21/04; C12N 9/00

(52) U.S. Cl. 800/8; 435/6; 435/69.1; 435/320.1; 435/325; 435/183; 530/350; 536/23.2

(57) ABSTRACT

Novel murine polynucleotides are disclosed that individually identify novel genes into which a retroviral gene trap vector has integrated. Additionally, novel mutated murine ES cells are described that stably incorporate retroviral gene trap constructs into the specifically identified genes. The novel genes and cells thus defined are useful in functional genomic analysis, and in the discovery and development of new therapeutic and diagnostics agents and methods.

[0001] The present application claims the benefit of U.S. Provisional Application No. 60/211,232 which was filed on Jun. 12, 2000 and is herein incorporated by reference in its entirety.

[0002] The present application incorporates by reference U.S. Applications Ser. Nos. 08/728,963, 60/109,302, 09/276,533 and U.S. Pat. Nos. 6,080,576, 6,136,566, 6,139,833 and their respective disclosures in their entirety.

### 1.0. FIELD OF THE INVENTION

[0003] The present invention is in the field of molecular genetics. The application discloses novel nucleic acid sequences that: each define the locus of a corresponding mutated murine embryonic stem cell clone, partially define the scope of exons that can be trapped and identified by the disclosed vectors/methods, and that are also useful, inter alia, for identifying the coding regions of the murine genome.

### 2.0. BACKGROUND OF THE INVENTION

[0004] Most mammalian genes are divided into exons and introns. Exons are the portions of the gene that are spliced into mRNA and encode the protein product of a gene. In genomic DNA, these coding exons are divided by noncoding intron sequences. Although RNA polymerase transcribes both intron and exon sequences, the intron sequences must be removed from the transcript so that the resulting mRNA can be translated into protein. Accordingly, all mammalian, and most eukaryotic, cells have the machinery to splice exons into mRNA. Gene trap vectors have been designed to integrate into introns or genes in a manner that allows the cellular splicing machinery to splice vector encoded exons to cellular mRNAs. Commonly, gene trap vectors contain selectable marker sequences that are preceded by strong splice acceptor sequences and are not preceded by a promoter. Thus, when such vectors integrate into a gene, the cellular splicing machinery splices exons from the trapped gene onto the 5′ end of the selectable marker sequence. Typically, such selectable marker genes can only be expressed if the vector encoding the gene has integrated into an intron. The resulting gene trap events are subsequently identified by selecting for cells that can survive selective culture.

[0005] Gene trapping has generally proven to be an efficient method of mutating large numbers of genes. The insertion of the gene trap vector creates a mutation in the trapped gene, and also provides a molecular tag for ease of identifying the gene that has been trapped. When ROSA Bgeo was used to trap genes it was demonstrated that at least 50% of the resulting mutations resulted in a phenotype when examined in mice. This indicates that the gene trap insertion vectors are useful mutagens. Although a powerful tool for mutating genes, the potential of the method has historically been limited by the difficulty in identifying the trapped genes. Methods that have been used to identify trap events rely on the fusion transcripts resulting from the splicing of exon sequences from the trapped gene to sequences encoded by the gene trap vector. Common gene identification protocols used to obtain sequences from these fusion transcripts include 5′ RACE, cDNA cloning, and cloning of genomic DNA surrounding the site of vector integration. However, these methods have proven labor intensive, not readily amenable to automation, and generally impractical for high-throughput.

[0006] More recently, vectors have been developed that rely on a new strategy of gene trapping that uses a vector that contains a selectable marker gene preceded by a promoter and followed by a splice donor sequence instead of a polyadenylation sequence. These vectors do not provide selection unless they integrate into a gene and subsequently trap downstream exons which provide a polyadenylation sequence. Integration of such vectors into the chromosome results in the splicing of the selectable marker gene to 3′ exons of the trapped gene. These vectors provide a number of advantages. They can be used to trap genes regardless of whether the genes are normally expressed in the cell type in which the vector has integrated. In addition, cells harboring such vectors can be screened using automated (e.g., 96-well plate format) gene identification assays such as 3′ RACE (see generally, Frohman, 1994, PCR Methods and Applications, 4:S40-S58). Using these vectors it is possible to produce large numbers of mutations and rapidly identify the mutated, or trapped, gene by DNA sequence analysis.

### 3.0. SUMMARY OF THE INVENTION

[0007] The subject invention provides numerous isolated and purified mammalian, particularly murine, cDNAs produced using gene trap technology. The OMNIBANK gene trapped sequences (GTSs) of the subject invention are disclosed as SEQ ID NOS: 1-1,159 in the appended Sequence Listing.

[0008] The subject invention contemplates the use of one or more of the subject GTSs, or portions thereof, to isolate cDNAs, genomic clones, or full-length genes/polynucleotides, or homologs, heterologs, paralogs, or orthologs thereof, that are capable of hybridizing to one or more of the disclosed GTSs under stringent conditions.

[0009] The subject invention additionally contemplates methods of analyzing biopolymer (e.g., oligonucleotides, polynucleotides, oligopeptides, peptides, polypeptides, proteins, etc.) sequence information comprising the steps of loading a first biopolymer sequence into or onto an electronic data storage medium (e.g., digital or analogue versions of electronic, magnetic, or optical memory, and the like) and comparing said first sequence to at least a portion of one of the polynucleotide sequences, or amino acid sequence encoded thereby, that is first disclosed in, or otherwise unique to, SEQ ID NOS: 1-1,159. Typically, the polynucleotide sequences, or amino acid sequences encoded thereby, will also be present on, or loaded into or onto a form of electronic data storage medium, or transferred therefrom, concurrent with or prior to comparison with the first polynucleotide.

[0010] Another embodiment of the claimed invention is the use of a oligonucleotide or polynucleotide sequence first disclosed in at least a portion of at least one of the GTS sequences of SEQ ID NOS: 1-1,159 as a hybridization probe. Of particular interest is the use of such sequences in conjunction with a solid support matrix/substrate (resins, beads, membranes, plastics, polymers, metal or metallized substrates, crystalline or polycrystalline substrates, etc.). Of particular note are spatially addressable arrays (i.e., gene chips, microtiter plates, etc.) of polynucleotides wherein at least one of the polynucleotides on the spatially addressable array comprises an oligonucleotide or polynucleotide sequence first disclosed in at least one of the GTS sequences of SEQ ID NOS: 1-1,159.

[0011] Moreover, an oligonucleotide or polynucleotide sequence first disclosed in at least one of the GTS sequences of SEQ ID NOS: 1-1,159 can be incorporated into a phage display system that can be used to screen for proteins, or other ligands, that are capable of binding an amino acid sequence encoded by an oligonucleotide or polynucleotide sequence first disclosed in at least one of the GTS sequences of SEQ ID NOS: 1-1,159.

[0012] An additional embodiment of the present invention is a library comprising individually isolated linear DNA molecules corresponding to at least a portion of the described GTSs which are useful for synthesizing physically contiguous sequences of overlapping related GTSs by, for example, the polymerase chain reaction (PCR).

[0013] The subject invention also provides for an oligonucleotide hybridization probe comprising sequence that is identical or complementary to a portion of a sequence that is first disclosed in, or preferably unique to, at least one of the GTS polynucleotides the sequence listing. The oligonucleotide probes will generally comprise between about 8 nucleotides and about 80 nucleotides, preferably between about 15 and about 40 nucleotides, and more preferably between about 20 and about 35 nucleotides.

[0014] The subject invention also provides for an antisense molecule which comprises at least a portion of sequence that is first disclosed in, or preferably unique to, at least one of the GTS polynucleotides.

[0015] The subject invention also contemplates a purified polypeptide in which at least a portion of the polypeptide is encoded by, and thus first disclosed by, at least a portion of a GTS of the present invention.

[0016] The subject invention further contemplates a mutated ES cell, or a mutated cell, tissue, or animal derived therefrom, that stably incorporates a gene trap vector into a specifically identified gene or a gene comprising one or more of the disclosed GTS polynucleotide sequences.

[0017] In summary, the unique sequences described in SEQ ID NOS:1-1,159 are usefull for the identification of coding sequence and the mapping of a unique gene to a particular chromosome. These novel sequences can also be used in addressable arrays, such as gene chips, to identify and characterize temporal and tissue specific gene expression. When the unique sequences described in SEQ ID NOS:1-1,159 are expressed in mouse embryonic stem cells (“ES cells”) these novel sequences provide a method of identifying phenotypic expression of the a particular gene as well as a method of assigning function to preveously unknown genes. The unique sequences described in SEQ ID NOS:1-1,159 can be further used to identify the gene of interest from many sources including, but not limited to, libraries consisting of cDNA or genomic clones and for the in silico screening of nucleic acid and protein databases. Additionally, SEQ ID NOS: 1-1,159 can be incorporated into a phage display system and used to screen for proteins, or other ligands. The unique sequences described in SEQ ID NOS:1-1,159 have further utility for genetic manipulations such as antisense inhibition and gene targeting.

### 4.0. DESCRIPTION OF THE SEQUENCE LISTING AND FIGURES

[0018] The Sequence Listing is a compilation of nucleotide sequences obtained by sequencing a gene trap library that at least partially identifies the genes in the target cell genome that can be trapped by the described gene trap vectors (i.e., the repertoire of genes that are active, or have not been inactivated, with the tested ES cell population). The Sequence Listing was prepared using the conventions described in the 1996 edition of the 37 C.F.R. sections 1.801-1.825, and/or WIPO Standard ST.25 as referenced by the 1999 edition of 37 C.F.R. sections 1.801-1.825

[0019] FIGS. 1A-1C present a diagrammatic representation of representative gene trap vectors used to generate the described sequences.

### 5.0. DETAILED DESCRIPTION OF THE INVENTION

[0020] The current invention relates to novel polynucleotides which are expressed in mouse embryonic stem cells (“ES cells”) and which provide unique tools for gene discovery, diagnostic gene expression analysis, cross species hybridization analysis, and for genetic manipulations using a variety of techniques known to those skilled in the art, like, for example, antisense inhibition, gene targeting, etc. Furthermore, the expression of these novel polynucleotides in ES cells suggests their involvement in developmental and cell differentiation processes, making them good candidates to treat disorders and abnormalities affecting development and cell differentiation.

[0021] Additionally, because they are totipotent, the disclosed mutated ES cells (Lex-1 cells from murine strain A129) can be microinjected into blastocysts, introduced to pseudopregnant host animals, and the offspring bred to produce mutated animals as described, for example, in “Mouse Mutagenesis”, 1998, Zambrowicz et al., eds., Lexicon Press, The Woodlands, Tex., and periodic updates thereof, and U.S. patent application Ser. No. 08/943,687 both of which are herein incorporated by reference. Consequently, an additional aspect of the subject invention are mutated mammalian, and preferably murine, cells that have been mutated by a process involving the use genetically engineered vectors or nucleotides to alter the naturally occurring function, sequence, or expression of a genetic locus encoding a novel portion of sequence (e.g., an exon, oligonucleotide sequence, splice junction, etc.) presented in one of the presently described GTSs.

### 5.1. POLYNUCLEOTIDES OF THE PRESENT INVENTION

[0022] The nucleotide sequences of the various isolated GTSs of the present invention appear in the Sequence Listing as SEQ ID NOS: 1-1,159. Additional embodiments of the present invention are GTS variants, or homologs, paralogs, orthologs, etc., which include isolated polynucleotides, or complements thereof, that hybridize to one or more of the disclosed GTSs of SEQ ID NOS: 1-1,159 under stringent, or preferably highly stringent, conditions.

[0023] By way of example and not limitation, high stringency hybridization conditions can be defined as follows: Prehybridization of filters containing DNA to be screened is carried out for 8 h to overnight at 65° C. in a buffer containing 6×SSC, 50 mM Tris-HCl (pH 7.5), 1 mM EDTA, 0.02% PVP, 0.02% Ficoll, 0.02% BSA, and 500 μg/ml denatured salmon sperm DNA. Filters are hybridized for 48 h at 65° C. in prehybridization mixture containing 100 μg/ml denatured salmon sperm DNA and 5-20×10⁶ cpm of ³²P-labeled probe (alternatively, as in all hybridizations described herein, approximately 42, 44, 46, 48, 50, 52, 54, 56, 58, 62, 64, 66, 68, 70, or about 72 degrees or more can be used). The filters are then washed in approximately 1× wash mix (10× wash mix contains 3M NaCl, 0.6M Tris base, and 0.02M EDTA, alternatively, as with all washes described herein, 2×, 3×, 4×, 5×, 6× wash mix, or more, can be used) twice for 5 minutes each at room temperature, then in 1× wash mix containing 1% SDS at 60° C. (alternatively, as in all washes described herein, approximately 42, 44, 46, 48, 50, 52, 54, 56, 58, 62, 64, 66, 68, 70, or about 72 degrees or more can be used) for about 30 min, and finally in 0.3× wash mix (alternatively, as in all final washes described herein, approximately, 0.2×, 0.4×, 0.6×, 0.8×, 1×, or any concentration between about 2× and about 6× can be used in conjunction with a suitable wash temperature) containing 0.1% SDS at 60° C. (alternatively, approximately 42, 44, 46, 48, 50, 52, 54, 56, 58, 62, 64, 66, 68, 70, or about 72 degrees or more can be used) for about 30 min. The filters are then air dried and exposed to x-ray film for autoradiography. In an alternative protocol, washing of filters is done for 37° C. for 1 h in a solution containing 2×SSC, 0.01% PVP, 0.01% Ficoll, and 0.01% BSA. This is followed by a wash in 0.1×SSC at 50° C. for 45 min before autoradiography. Another example of hybridization under highly stringent conditions is hybridization to filter-bound DNA in 0.5 M NaHPO₄, 7% sodium dodecyl sulfate (SDS), 1 mM EDTA at 65° C., and washing in 0.1×SSC/0.1% SDS at 68° C. (Ausubel F. M. et al., eds., 1989, Current Protocols in Molecular Biology, Vol. I, Green Publishing Associates, Inc., and John Wiley & sons, Inc., New York, at p. 2.10.3).

[0024] Additionally contemplated are GTS polynucleotides that are at least about 99, 95, 90, or about 85 percent similar to corresponding regions of one of SEQ ID NOS: 1-1,159 (as measured by BLAST sequence comparison analysis using, for example, the GCG sequence analysis package using default parameters).

[0025] Preferably, such GTS variants will encode at least a portion or domain of a, preferably naturally occurring, protein or polypeptide that encodes a functional equivalent to a protein or polypeptide, or portion or domain thereof, encoded by the disclosed GTSs. Additional examples of GTS variants include polynucleotides, or complements thereof, that are capable of binding to the disclosed GTSs under less stringent conditions, such as moderately stringent conditions, (e.g., washing in 0.2×SSC/0.1% SDS at 420° C. (Ausubel et al., 1989, supra). Moderately stringent conditions can be additionally defined, for example, as follows: Filters containing DNA are pretreated for 6 h at 55° C. in a solution containing 6×SSC, 5× Denhart's solution, 0.5% SDS and 100 ìg/ml denatured salmon sperm DNA. Hybridizations are carried out in the same solution and 5-20×10⁶ cpm ³²p-labeled probe is used. Filters are incubated in hybridization mixture for 18-20 h at 55° C. (alternatively, as in all hybridizations described herein, approximately 42, 44, 46, 48, 50, 52, 54, 56, 58, 62, 64, 66, 68, 70, or about 72 degrees or more can be used in combination with a suitable concentration of salt). The filters are then washed in approximately 1× wash mix (10× wash mix contains 3M NaCl, 0.6M Tris base, and 0.02M EDTA, alternatively, as with all washes described herein, 2×, 3×, 4×, 5×, 6× wash mix, or more, can be used) twice for 5 minutes each at room temperature, then in 1× wash mix containing 1% SDS at 60° C. (alternatively, as in all washes described herein, approximately, 42, 44, 46, 48, 50, 52, 54, 56, 58, 62, 64, 66, 68, 70, or about 72 degrees or more can be used) for about 30 min, and finally in 0.3× wash mix (alternatively, as in all final washes described herein approximately 0.2×, 0.4×, 0.6×, 0.8×, 1×, or any concentration between about 2× and about 6× can be used in conjunction with a suitable wash temperature) containing 0.1% SDS at 60° C. (alternatively, approximately 42, 44, 45, 48, 50, 52, 54, 56, 58, 62, 64, 66, 68, 70, or about 72 degrees or more can be used) for about 30 min. The filters are then air dried and exposed to x-ray film for autoradiography.

[0026] In an alternative protocol, washing of filters is done twice for 30 minutes at 60° C. in a solution containing 1×SSC and 0.1% SDS. Filters are blotted dry and exposed for autoradiography.

[0027] Other conditions of moderate stringency which may be used are well-known in the art. For example, washing of filters can be done at 37° C. for 1 h in a solution containing 2×SSC, 0.1% SDS. Another example of hybridization under moderately stringent conditions is washing in 0.2×SSC/0.1% SDS at 42° C. (Ausubel et al., 1989, supra). Such less stringent conditions may also be, for example, low stringency hybridization conditions. By way of example and not limitation, procedures using such conditions of low stringency are as follows (see also Shilo and Weinberg, 1981, Proc. Natl. Acad. Sci. USA 78:6789-6792): Filters containing DNA are pretreated for 6 h at 40° C. in a solution containing 35% formamide, 5×SSC, 50 mM Tris-HCl (pH 7.5), 5 mM EDTA, 0.1% PVP, 0.1% Ficoll, 1% BSA, and 500 μg/ml denatured salmon sperm DNA. Hybridizations are carried out in the same solution with the following modifications: 0.02% PVP, 0.02% Ficoll, 0.2% BSA, 100 μg/ml salmon sperm DNA, 10% (wt/vol) dextran sulfate, and 5-20×10⁶ cpm ³²P-labeled probe is used. Filters are incubated in hybridization mixture for 18-20 h at 40° C. (alternatively, as in all hybridizations described herein, approximately 42, 44, 46, 48, 50, 52, 54, 56, 58, 62, 64, 66, 68, 70, or about 72 degrees or more can be used). The filters are then washed in approximately 1× wash mix (10× wash mix contains 3M NaCl, 0.6M Tris base, and 0.02M EDTA, alternatively, as with all washes described herein, 2×, 3×, 4×, 5×, 6× wash mix, or more, can be used) twice for five minutes each at room temperature, then in 1× wash mix containing 1% SDS at 60° C. (alternatively, as in all washes described herein, approximately 42, 44, 46, 48, 50, 52, 54, 56, 58, 62, 64, 66, 68, 70, or about 72 degrees or more can be used) for about 30 min, and finally in 0.3× wash mix (alternatively, as in all final washes described herein, approximately, 0.2×, 0.4×, 0.6×, 0.8×, 1×, or any concentration between about 2× and about 6× can be used in conjunction with a suitable wash temperature) containing 0.1% SDS at 60° C. (alternatively, approximately 42, 44, 46, 48, 50, 52, 54, 56, 58, 62, 64, 66, 68, 70, or about 72 degrees or more can be used) for about 30 min. The filters are then air dried and exposed to x-ray film for autoradiography. In yet another alternative protocol, washing of filters is done for 1.5 h at 55° C. in a solution containing 2×SSC, 25 mM Tris-HCl (pH 7.4), 5 mM EDTA, and 0.1% SDS. The wash solution is replaced with fresh solution and incubated an additional 1.5 h at 60° C. Filters are then blotted dry and exposed for autoradiography. If necessary, filters are washed for a third time at 65-68° C. and reexposed to film. Other conditions of low stringency which may be used are well known in the art (e.g., as employed for cross-species hybridizations). Preferably, GTS variants identified or isolated using the above methods will also encode a functionally equivalent gene product (i.e., protein, polypeptide, or domain thereof, encoding or otherwise associated with a function or structure at least partially encoded by the complementary GTS).

[0028] Additional embodiments contemplated by the present invention include any polynucleotide sequence comprising a continuous stretch of nucleotide sequence originally disclosed in, or otherwise unique to, any of the GTSs of SEQ ID NOS: 1-1,159 that are at least 8, or at least 10, or at least 14, or at least 20, or at least 30, or at least about 40, and preferably at least about 60 consecutive nucleotides up to about several hundred bases of nucleotide sequence or an entire GTS sequence. Functional equivalents of the gene products of SEQ ID NOS: 1-1,159 include naturally occurring variants of SEQ ID NOS: 1-1,159 present in other species, and mutant variants, both naturally occurring and engineered, which retain at least some of the functional activities of the gene products of SEQ ID NOS: 1-1,159.

[0029] The invention also includes degenerate variants of the claimed GTS sequences, and products encoded thereby. The invention further includes GTS derivatives wherein any of the disclosed GTSs, or GTS variants, is linked to another polynucleotide molecule, or a fragment thereof, wherein the link may be either directly or through other polynucleotides of any sequence and of a length of about 1,000 base pairs, or about 500 base pairs, or about 300 base pairs, or about 200 base pairs, or about 150 base pairs, or about 100 base pairs or about 50 base pairs, or less.

[0030] The invention also particularly includes polynucleotide molecules, including DNA, that hybridize to, and are therefore the complements of, the nucleotide sequences of the disclosed GTSs. Such hybridization conditions may be highly stringent or less highly stringent, as described above. In instances wherein the nucleic acid molecules are deoxyoligonucleotides (“DNA oligos”), highly stringent conditions may refer to, for example, washing in 6×SSC/0.05% sodium pyrophosphate at 37° C. (for oligos having 14-base DNA oligos), 48° C. (for 17-base DNA oligos), 55° C. (for 20-base DNA oligos), and 60° C. (for 23-base oligos). Similar conditions are contemplated for RNA oligos corresponding to a portion of the disclosed GTS sequences.

[0031] These nucleic acid molecules may encode or act as antisense molecules to polynucleotides comprising at least a portion of the sequences first disclosed in SEQ ID NOS: 1-1,159 that are useful, for example, to regulate the expression of genes comprising a nucleotide sequence of any of SEQ ID NOS: 1-1,159, and can also be used, for example, as antisense primers in amplification reactions of gene sequences. With respect to gene regulation, such techniques can be used to regulate, for example, developmental processes by inhibiting, enhancing, hindering, or otherwise modulating the expression of genes in target cells, or particularly in embryonic stem cells. Further, such sequences may be used as part of ribozyme and/or triple helix sequences that can be used to regulate gene expression. Optionally, genes or polynucleotides encoding the GTSs can be conditionally expressed.

[0032] Still further, such molecules may be used as components of diagnostic methods whereby, for example, the presence of a particular allele, of a gene that contains any of the sequences of SEQ ID NOS: 1-1,159 may be detected. Of particular interest is the use of the disclosed GTSs to conduct analysis of single nucleotide polymorphisms (SNPs) in the human genome, or as general or individual-specific forensic markers.

[0033] In addition to the nucleotide sequences described above, full length cDNA or gene sequences that contain any of SEQ ID NOS: 1-1,159 present in the same species and/or homologs of any of those genes present in other species can be identified and isolated by using molecular biological techniques known in the art.

[0034] In order to clone the full length cDNA sequence from any species encoding the cDNA corresponding to the entire messenger RNA or to clone variant or heterologous forms of the molecule, labeled DNA probes made from nucleic acid fragments corresponding to any of the partial cDNA disclosed herein may be used to screen a cDNA library. For example, oligonucleotides corresponding to either the 5′ or 3′ terminus of the cDNA sequence may be used to obtain longer nucleotide sequences. Briefly, the library may be plated out to yield a maximum of about 30,000 pfu for each 150 mm plate. Approximately 40 plates may be screened. The plates are incubated at 37° C. until the plaques reach a diameter of 0.25 mm or are just beginning to make contact with one another (3-8 hours). Nylon filters are placed onto the soft top agarose and after 60 seconds, the filters are peeled off and floated on a DNA denaturing solution consisting of 0.4N sodium hydroxide. The filters are then immersed in neutralizing solution consisting of 1 M Tris HCl, pH 7.5, before being allowed to air dry. The filters are prehybridized in casein hybridization buffer containing 10% dextran sulfate, 0.5 M NaCl, 50 mM Tris HCL, pH 7.5, 0.1% sodium pyrophosphate, 1% casein, 1% SDS, and denatured salmon sperm DNA at 0.5 mg/ml for 6 hours at 60° C. The radiolabelled probe is then denatured by heating to 95° C. for 2 minutes and then added to the prehybridization solution containing the filters. The filters are hybridized at 60° C. (alternatively, as in all hybridizations described herein, approximately 42, 44, 46, 48, 50, 52, 54, 56, 58, 62, 64, 66, 68, 70, or about 72 degrees or more can be used) for about 16 hours. The filters are then washed in approximately 1× wash mix (10× wash mix contains 3M NaCl, 0.6M Tris base, and 0.02M EDTA, alternatively, as with all washes described herein, 2×, 3×, 4×, 5×, 6× wash mix, or more, can be used) twice for 5 minutes each at room temperature, then in 1× wash mix containing 1% SDS at 60° C. (alternatively, as in all washes described herein, approximately 42, 44, 46, 48, 50, 52, 54, 56, 58, 62, 64, 66, 68, 70, or about 72 degrees or more can be used) for about 30 min, and finally in 0.3× wash mix (alternatively, as in all final washes described herein, approximately, 0.2×, 0.4×, 0.6×, 0.8×, 1×, or any concentration between about 2× and about 6× can be used in conjunction with a suitable wash temperature) containing 0.1% SDS at 60° C. (alternatively, approximately 42, 44, 46, 48, 50, 52, 54, 56, 58, 62, 64, 66, 68, 70, or about 72 degrees or more can be used) for about 30 min. The filters are then air dried and exposed to x-ray film for autoradiography. After developing, the film is aligned with the filters to select a positive plaque. If a single, isolated positive plaque cannot be obtained, the agar plug containing the plaques will be removed and placed in lambda dilution buffer containing 0.1M NaCl, 0.01M magnesium sulfate, 0.035M Tris HCl, pH 7.5, 0.01% gelatin. The phage may then be replated and rescreened to obtain single, well isolated positive plaques. Positive plaques may be isolated and the cDNA clones sequenced using primers based on the known cDNA sequence. This step may be repeated until a full length cDNA is obtained.

[0035] It may be necessary to screen multiple cDNA libraries from different sources/tissues to obtain a full length cDNA. In the event that it is difficult to identify cDNA clones encoding the complete 5′ terminal coding region, an often encountered situation in cDNA cloning, the RACE (Rapid Amplification of cDNA Ends) technique may be used. RACE is a proven PCR-based strategy for amplifying the 5′ end of incomplete cDNAs. 5′-RACE-Ready cDNA synthesized from human fetal liver containing a unique anchor sequence is commercially available (Clontech). To obtain the 5′ end of the cDNA, PCR is carried out, for example, on 5′-RACE-Ready cDNA using the provided anchor primer and the 3′ primer. A secondary PCR reaction is then carried out using the anchored primer and a nested 3′ primer according to the manufacturer's instructions.

[0036] Once obtained, the full length cDNA sequence may be translated into amino acid sequence and examined for certain landmarks found in the amino acid sequences encoded by SEQ ID NOS: 1-1,159, or any structural similarities to these disclosed sequences.

[0037] The identification of homologs, heterologs, or paralogs of SEQ ID NOS: 1-1,159 in other, preferably related, species can be useful for developing additional animal model systems that are closely related to humans for purposes of drug discovery. Genes at other genetic loci within the genome that encode proteins which have extensive homology to one or more domains of the gene products encoded by SEQ ID NOS: 1-1,159 can also be identified via similar techniques. In the case of cDNA libraries, such screening techniques can identify clones derived from alternatively spliced transcripts in the same or different species.

[0038] Screening can be done using filter hybridization with duplicate filters. The labeled probe can contain at least 15-30 base pairs of the nucleotide sequence presented in SEQ ID NOS: 1-1,159. The hybridization washing conditions used should be of a lower stringency when the cDNA library is derived from an organism different from, or heterologous to, the type of organism from which the labeled sequence was derived. With respect to the cloning of a mammalian homolog, heterolog, ortholog, or paralog, using probes derived from any of the sequences of SEQ ID NOS: 1-1,159, for example, hybridization can, for example, be performed at 65° C. overnight in Church's buffer (7% SDS, 250 mM NaHPO₄, 2 mM EDTA, 1% BSA). Washes can be done with 2×SSC, 0.1% SDS at 65° C. and then at 0.1×SSC, 0.1% SDS at 65° C.

[0039] Low stringency conditions are well known to those of skill in the art, and will vary predictably depending on the specific organisms from which the library and the labeled sequences are derived. For guidance regarding such conditions see, for example, Sambrook et al., 1989, Molecular Cloning, A Laboratory Manual, Cold Springs Harbor Press, N.Y.; and Ausubel et al., 1989, Current Protocols in Molecular Biology, Green Publishing Associates and Wiley Interscience, N.Y.

[0040] Alternatively, the labeled nucleotide probe of a sequence of any of SEQ ID NOS: 1-1,159 may be used to screen a genomic library derived from the organism of interest, again, using appropriately stringent conditions. The identification and characterization of human genomic clones is helpful for designing diagnostic tests and clinical protocols for treating disorders in human patients that are known or suspected to be linked to disease or other development or cell differentiation disorders and abnormalities. For example, sequences derived from regions adjacent to the intron/exon boundaries of the human gene can be used to design primers for use in amplification assays to detect mutations within the exons, introns, splice sites (e.g., splice acceptor and/or donor sites), etc., that can be used in diagnostics.

[0041] Further, gene homologs can also be isolated from nucleic acid of the organism of interest by performing PCR using two oligonucleotide primers derived from SEQ ID NOS: 1-1,159, or two degenerate oligonucleotide primer pools designed on the basis of amino acid sequences within the gene products encoded by SEQ ID NOS: 1-1,159. The template for the reaction may be cDNA obtained by reverse transcription of mRNA prepared from, for example, human or non-human cell lines, cell types, or tissues, like, for example, ES cells from the organism of interest.

[0042] The PCR product may be subcloned or sequenced directly or subcloned and sequenced to ensure that the amplified sequences represent the sequences of the gene corresponding to the sequence of SEQ ID NOS: 1-1,159 of interest. The PCR fragment may then be used to isolate a full length cDNA clone by a variety of methods. For example, the amplified fragment may be labeled and used to screen a cDNA library, such as a bacteriophage cDNA library. Alternatively, the labeled fragment may be used to isolate genomic clones via the screening of a genomic library.

[0043] PCR technology may also be utilized to isolate full length cDNA sequences. For example, RNA may be isolated, following standard procedures, from an appropriate cellular source (i.e., one known, or suspected, to express the gene corresponding to the sequence of SEQ ID NOS: 1-1,159 of interest, such as, for example, ES cells). A reverse transcription reaction may be performed on the RNA using an oligonucleotide primer specific for the most 5′ end of the amplified fragment for the priming of first strand synthesis. The resulting RNA/DNA hybrid may then be “tailed” with guanines, for example, using a standard terminal transferase reaction, the hybrid may be digested with RNase H, and second strand synthesis may then be primed with a poly-C primer. Thus, cDNA sequences upstream from the amplified fragment may easily be isolated. For a review of cloning strategies which may be used, see e.g., Sambrook et al., 1989, supra. Alternatively, cDNA or genomic libraries can be screened using 5′ PCR primers that hybridize to vector sequences and 3′ PCR primers specific to the gene of interest. Typically, such primers comprise oligonucleotide “priming” sequences first disclosed in, or otherwise unique to, one of the GTSs of SEQ ID NOS: 1-1,159.

[0044] The sequence of a gene corresponding to any of the sequences of SEQ ID NOS: 1-1,159 can also be used to isolate mutant alleles of that gene. Such mutant alleles may be isolated from individuals either known or suspected to have a genotype which contributes to the disease of interest or other symptoms of developmental and cell differentiation and/or proliferation disorders and abnormalities. Mutant alleles and mutant allele products may then be utilized in the therapeutic and diagnostic programs described below. Additionally, such sequences of any of the genes corresponding to SEQ ID NOS: 1-1,159 can be used to detect gene regulatory (e.g., promoter or promoter/enchanter) defects which can affect development or cell differentiation.

[0045] A cDNA of a mutant gene corresponding to any of the sequences of SEQ ID NOS: 1-1,159 can be isolated as discussed above, or, for example, by using PCR. In this case, the first cDNA strand may be synthesized by hybridizing an oligo-dT oligonucleotide to mRNA isolated from cells derived from an individual suspected of carrying a mutant gene corresponding to any of the sequences of SEQ ID NOS: 1-1,159 by extending the new strand with reverse transcriptase. The second strand of the cDNA is then synthesized using an oligonucleotide that hybridizes specifically to the 5′ region of the normal gene. The amplified product can be directly sequenced or cloned into a suitable vector and subsequently subjected to DNA sequence analysis. By comparing the DNA sequence of the mutant allele to that of the normal allele, the mutation(s) responsible for the loss or alteration of function of the mutant gene product can be ascertained.

[0046] Alternatively, a genomic library can be constructed using DNA obtained from one or more individuals suspected of carrying, or known to carry, a mutant allele corresponding to any of SEQ ID NOS: 1-1,159. Corresponding mutant cDNA libraries can be also constructed using RNA from cell types known, or suspected, to express such mutant alleles. The corresponding normal gene, or any suitable fragment thereof, may then be labeled and used as a probe to identify the corresponding mutant allele in such libraries. Clones containing the mutant gene sequences may then be identified and analyzed by DNA sequence analysis.

[0047] Additionally, a protein expression library can be constructed utilizing cDNA synthesized from, for example, RNA isolated from a cell type known, or suspected, to express a mutant allele corresponding to any of the sequences of SEQ ID NOS: 1-1,159 from an individual suspected of, carrying or known to carry, such a mutant allele. In this manner, gene products made by the putatively mutant cell type may be expressed and screened using standard antibody screening techniques in conjunction with antibodies raised against the corresponding normal gene product or a portion thereof, as described below in Section 5.4 (For screening techniques, see, for example, Harlow, E. and Lane, eds., 1988, “Antibodies: A Laboratory Manual”, Cold Spring Harbor Press, Cold Spring Harbor.) Additionally, screening can be accomplished by screening with labeled fusion proteins. In cases where a mutation results in an expressed gene product with altered function (e.g., as a result of a missense or a frame shift mutation), a polyclonal set of antibodies to the wild-type gene product are likely to cross-react with the mutant gene product. Library clones detected via their reaction with such labeled antibodies can be purified and subjected to sequence analysis according to methods well known to those of skill in the art.

[0048] The invention also encompasses nucleotide sequences that encode mutant isoforms of any of the amino acid sequences encoded by the GTSs of SEQ ID NOS: 1-1,159, peptide fragments thereof, truncated versions thereof, and fusion proteins including any of the above. Examples of such fusion proteins can include, but not limited to, an epitope tag which aids in purification or detection of the resulting fusion protein; or an enzyme, fluorescent protein, luminescent protein which can be used as a marker.

[0049] The present invention additionally encompasses (a) RNA or DNA vectors that contain any portion of SEQ ID NOS: 1-1,159 and/or their complements as well as any of the peptides or proteins encoded thereby; (b) DNA vectors that contain a cDNA that substantially spans the entire open reading frame corresponding to any of the sequences of SEQ ID NOS: 1-1,159 and/or their complements; (c) DNA expression vectors that contain any of the foregoing sequences, or a portion thereof, operatively associated with a (d) genetically engineered host cells that contain a cDNA that spans the entire open reading frame, or any portion thereof, corresponding to any of the sequences of SEQ ID NOS: 1-1,159 operatively associated with a regulatory element, generally recombinantly positioned either in vivo (such as in gene activation) or in vitro, that directs the expression of the GTS coding sequences in the host cell. As used herein, regulatory elements include but are not limited to inducible and non-inducible promoters, enhancers, operators and other elements known to those skilled in the art that drive and regulate expression. Such regulatory elements include but are not limited to the baculovirus promoter, cytomegalovirus hCMV immediate early gene promoter, the early or late promoters of SV40 adenovirus, the lac system, the trp system, the TAC system, the TRC system, the major operator and promoter regions of phage A, the control regions of fd coat protein, acid phosphatase promoters, phosphoglycerate kinase (PGK) and especially 3-phosphoglycerate kinase promoters, and yeast alpha mating factors.

[0050] Because the described GTSs represent cellular exon sequence that has been recognized and spliced by the cellular splicing machinery, each GTS further identifies at least one exon and/or exon splice junctions that is useful, and in many cases necessary, for chromosome mapping and the analysis and practical application of genomic DNA sequence data.

### 5.2. PROTEINS AND POLYPEPTIDES ENCODED BY POLYNUCLEOTIDES EXPRESSED IN MOUSE ES CELLS

[0051] Peptides and proteins encoded by the open reading frame of mRNAs corresponding to SEQ ID NOS: 1-1,159, polypeptides and peptide fragments, mutated, truncated or deleted forms of those peptides and proteins, fusion proteins containing any of those peptides and proteins can be prepared for a variety of uses, including but not limited to, the generation of antibodies, as reagents in diagnostic assays, the identification of other cellular gene products involved in the regulation of development and cellular differentiation of various cell types, like, for example, ES cells, as reagents in assays for screening for compounds that can be used in the treatment of disorders affecting development and cell differentiation, and as pharmaceutical reagents useful in the treatment of disorders affecting development and cell differentiation.

[0052] The invention also encompasses proteins, peptides, and polypeptides that are functionally equivalent to those encoded by SEQ ID NOS: 1-1,159. Such functionally equivalent products include, but are not limited to, additions or substitutions of amino acid residues within the amino acid sequence encoded by the nucleotide sequences described above, but which result in a silent change, thus producing a functionally equivalent gene product. Amino acid substitutions can be made on the basis of similarity in polarity, charge, solubility, hydrophobicity, hydrophilicity, and/or the amphipathic nature of the residues involved. For example, nonpolar (hydrophobic) amino acids include alanine, leucine, isoleucine, valine, proline, phenylalanine, tryptophan, and methionine; polar neutral amino acids include glycine, serine, threonine, cysteine, tyrosine, asparagine, and glutamine; positively charged (basic) amino acids include arginine, lysine, and histidine; and negatively charged (acidic) amino acids include aspartic acid and glutamic acid.

[0053] While random mutations can be introduced into DNA encoding peptides and proteins of the current invention (using random mutagenesis techniques well known to those skilled in the art), and the resulting mutant peptides and proteins tested for activity, site-directed mutations of the coding sequence can be engineered (using standard site-directed mutagenesis techniques) to generate mutant peptides and proteins of the current invention having increased functionality.

[0054] For example, the novel amino acid sequence of peptides and proteins at least partially encoded by the GTSs of the current invention can be aligned with homologs from different species. Mutant peptides and proteins can be engineered so that regions of interspecies identity are maintained, whereas the variable residues are altered, e.g., by deletion or insertion of an amino acid residue(s) or by substitution of one or more different amino acid residues. Conservative alterations at the variable positions can be engineered in order to produce a mutant form of a peptide or protein of the current invention that retains function. Non-conservative changes can be engineered at these variable positions to alter function. Alternatively, where alteration of function is desired, deletion or non-conservative alterations of the conserved regions can be engineered. One of skill in the art may easily test such mutant or deleted form of a peptide or protein of the current invention for these alterations in function using the teachings presented herein.

[0055] Other mutations to the coding sequences described above can be made to generate peptides and proteins that are better suited for expression, scale up, etc. in the host cells chosen. For example, the triplet code for each amino acid can be modified to conform more closely to the preferential codon usage of the host cell's translational machinery, or, for example, to yield a messenger RNA molecule with a longer half-life. Those skilled in the art would readily know what modifications of the nucleotide sequence would be desirable to conform the nucleotide sequence to preferential codon usage or to make the messenger RNA more stable. Such information would be obtainable, for example, through use of computer programs, through review of available research data on codon usage and messenger RNA stability, and through other means known to those of skill in the art.

[0056] Peptides corresponding to one or more domains (or a portion of a domain) of one of the proteins described above, truncated or deleted proteins, as well as fusion proteins in which the full length protein described above, a subunit peptide or truncated version is fused to an unrelated protein are also within the scope of the invention and can be designed by those of skill in the art on the basis of experimental or functional considerations. Such fusion proteins include but are not limited to fusions to an epitope tag; or fusions to an enzyme, fluorescent protein, or luminescent protein which provide a marker function.

[0057] While the peptides and proteins of the current invention can be chemically synthesized (e.g., see Creighton, 1983, Proteins: Structures and Molecular Principles, W. H. Freeman & Co., N.Y.), large polypeptides derived from any of the polynucleotides described above may advantageously be produced by recombinant DNA technology using techniques well known in the art for expressing genes and/or coding sequences. These methods include, for example, in vitro recombinant DNA techniques, synthetic techniques, and in vivo genetic recombination. See, for example, the techniques described in Sambrook et al., 1989, supra, and Ausubel et al., 1989, supra. Alternatively, RNA capable of encoding any of the nucleotide sequences described above may be chemically synthesized using, for example, synthesizers. See, for example, the techniques described in “Oligonucleotide Synthesis”, 1984, Gait, M. J. ed., IRL Press, Oxford, which is incorporated by reference herein in its entirety.

[0058] A variety of host-expression vector systems may be utilized to express the nucleotide sequences of the invention. Where the peptide or protein to be synthesized is a soluble derivative, the peptide or polypeptide can be recovered from the culture, i.e., from the host cell in cases where the peptide or polypeptide is not secreted, and from the culture media in cases where the peptide or polypeptide is secreted by the cells. However, such engineered host cells themselves may be used in situations where it is important not only to retain the structural and functional characteristics of the expressed peptide or protein, but to assess biological activity, e.g., in drug screening assays.

[0059] The expression systems that may be used for purposes of the invention include but are not limited to microorganisms such as bacteria (e.g., E. coli, B. subtilis) transformed with recombinant bacteriophage DNA, plasmid DNA or cosmid DNA expression vectors containing a nucleotide sequence of the current invention; yeast (e.g., Saccharomyces, Pichia, etc.) transformed with recombinant yeast expression vectors containing a nucleotide sequence of the current invention; insect cell systems infected with recombinant virus expression vectors (e.g., baculovirus) containing a nucleotide sequence of the current invention; plant cell systems infected with recombinant virus expression vectors (e.g., cauliflower mosaic virus, CaMV; tobacco mosaic virus, TMV) or transformed with recombinant plasmid expression vectors (e.g., Ti plasmid) containing a nucleotide sequence of the current invention; or mammalian cell systems (e.g., COS, CHO, BHK, 293, 3T3, U937) harboring recombinant expression constructs containing promoters derived from the genome of mammalian cells (e.g., metallothionein promoter) or from mammalian viruses (e.g., the adenovirus late promoter; the vaccinia virus 7.5K promoter).

[0060] In bacterial systems, a number of expression vectors may be advantageously selected depending upon the use intended for the gene product being expressed. For example, when large quantities of such a protein are to be produced for the generation of pharmaceutical compositions of a protein or for raising antibodies to the protein to be expressed, for example, vectors which direct the expression of high levels of fusion protein products that are readily purified may be desirable. Such vectors include, but are not limited, to the E. coli expression vector pUR278 (Ruther et al., 1983, EMBO J. 2:1791), in which the coding sequence of the polynucleotide to be expressed may be ligated individually into the vector in frame with the lacZ coding region so that a fusion protein is produced; pIN vectors (Inouye & Inouye, 1985, Nucleic Acids Res. 13:3101-3109; Van Heeke & Schuster, 1989, J. Biol. Chem. 264:5503-5509); and the like. pGEX vectors may also be used to express foreign polypeptides as fusion proteins with glutathione S-transferase (GST). If the inserted sequence encodes a relatively small polypeptide (less than 25 kD), such fusion proteins are generally soluble and can easily be purified from lysed cells by adsorption to glutathione-agarose beads followed by elution in the presence of free glutathione. The pGEX vectors are designed to include thrombin or factor Xa protease cleavage sites so that the cloned target gene product can be released from the GST moiety. Alternatively, if the resulting fusion protein is insoluble and forms inclusion bodies in the host cell, the inclusion bodies may be purified and the recombinant protein solubilized using techniques well known to one of skill in the art.

[0061] In an insect system, Autographa californica nuclear polyhidrosis virus (AcNPV) may be used as a vector to express foreign genes. (e.g., see Smith et al., 1983, J. Virol. 46: 584; Smith, U.S. Pat. No. 4,215,051). In one embodiment of the current invention, Sf9 insect cells are infected with a baculovirus vector expressing a peptide or protein of the current invention.

[0062] In mammalian host cells, a number of viral-based expression systems may be utilized. Specific embodiments described more fully below express tagged cDNA sequences of the current invention using a CMV promoter to transiently express recombinant protein in U937 cells or in Cos-7 cells. Alternatively, retroviral vector systems well known in the art may be used to insert the recombinant expression construct into host cells.

[0063] In yeast, a number of vectors containing constitutive or inducible promoters may be used. For a review, see Current Protocols in Molecular Biology, Vol. 2, 1988, Ed. Ausubel et al., Greene Publish. Assoc. & Wiley Interscience, Ch. 13; Grant et al., 1987, Expression and Secretion Vectors for Yeast, in Methods in Enzymology, Eds. Wu & Grossman, 1987, Acad. Press, N.Y., Vol. 153, pp. 516-544; Glover, 1986, DNA Cloning, Vol. II, IRL Press, Wash., D.C., Ch. 3; and Bitter, 1987, Heterologous Gene Expression in Yeast, Methods in Enzymology, Eds. Berger & Kimmel, Acad. Press, N.Y., Vol. 152, pp. 673-684; and The Molecular Biology of the Yeast Saccharomyces, 1982, Eds. Strathern et al., Cold Spring Harbor Press, Vols. I and II.

[0064] In cases where plant expression vectors are used, the expression of the coding sequence may be driven by any of a number of promoters. For example, viral promoters such as the 35S RNA and 19S RNA promoters of CaMV (Brisson et al., 1984, Nature, 310:511-514), or the coat protein promoter of TMV (Takamatsu et al., 1987, EMBO J. 6:307-311) may be used; alternatively, plant promoters such as the small subunit of RUBISCO (Coruzzi et al., 1984, EMBO J. 3:1671-1680; Broglie et al., 1984, Science 224:838-843); or heat shock promoters, e.g., soybean hsp17.5-E or hsp17.3-B (Gurley et al., 1986, Mol. Cell. Biol. 6:559-565) may be used. These constructs can be introduced into plant cells using Ti plasmids, Ri plasmids, plant virus vectors, direct DNA transformation, microinjection, electroporation, etc. For reviews of such techniques see, for example, Weissbach & Weissbach, 1988, Methods for Plant Molecular Biology, Academic Press, N.Y., Section VIII, pp. 421-463; and Grierson & Corey, 1988, Plant Molecular Biology, 2d Ed., Blackie, London, Ch. 7-9.

[0065] In cases where an adenovirus is used as an expression vector, the nucleotide sequence of interest may be ligated to an adenovirus transcription/translation control complex, e.g., the late promoter and tripartite leader sequence. This chimeric gene may then be inserted in the adenovirus genome by in vitro or in vivo recombination. Insertion in a non-essential region of the viral genome (e.g., region E1 or E3) will result in a recombinant virus that is viable and capable of expressing the gene product of interest in infected hosts. (e.g., See Logan & Shenk, 1984, Proc. Natl. Acad. Sci. USA 81:3655-3659). Specific initiation signals may also be required for efficient translation of inserted nucleotide sequences of interest. These signals include the ATG initiation codon and adjacent sequences. In cases where an entire gene or cDNA, including its own initiation codon and adjacent sequences, is inserted into the appropriate expression vector, no additional translational control signals may be needed. However, in cases where only a portion of a coding sequence of interest is inserted, exogenous translational control signals, including, perhaps, the ATG initiation codon, must be provided. Furthermore, the initiation codon must be in phase with the reading frame of the desired coding sequence to ensure translation of the entire insert. These exogenous translational control signals and initiation codons can be of a variety of origins, both natural and synthetic. The efficiency of expression may be enhanced by the inclusion of appropriate transcription enchanter elements, transcription terminators, etc. (See Bitter et al., 1987, Methods in Enzymol. 153:516-544).

[0066] In addition, a host cell strain may be chosen which modulates the expression of the inserted sequences, or modifies and processes the gene product in the specific fashion desired. Such modifications (e.g., glycosylation) and processing (e.g., cleavage) of protein products may be important for the function of the protein. Different host cells have characteristic and specific mechanisms for the post-translational processing and modification of proteins and gene products. Appropriate cell lines or host systems can be chosen to ensure the correct modification and processing of the foreign protein expressed. To this end, eukaryotic host cells which possess the cellular machinery for proper processing of the primary transcript may be used. Such mammalian host cells include but are not limited to CHO, VERO, BHK, HeLa, COS, MDCK, 293, 3T3, WI38, and U937 cells.

[0067] For long-term, high-yield production of recombinant proteins, stable expression is preferred. For example, cell lines which stably express the sequences of interest described above may be engineered. Rather than using expression vectors which contain viral origins of replication, host cells can be transformed with DNA controlled by appropriate expression control elements (e.g., promoter, enhancer sequences, transcription terminators, polyadenylation sites, etc.), and a selectable marker. Following the introduction of the foreign DNA, engineered cells may be allowed to grow for 1-2 days in an enriched media, and then are switched to a selective media. The selectable marker in the recombinant plasmid confers resistance to the selection and allows cells to stably integrate the plasmid into their chromosomes and grow to form foci which in turn can be cloned and expanded into cell lines. This method may advantageously be used to engineer cell lines which express the gene product of interest. Such engineered cell lines may be particularly useful in screening and evaluation of compounds that affect the endogenous activity of the gene product of interest.

[0068] A number of selection systems may be used, including but not limited to the herpes simplex virus thymidine kinase (Wigler et al., 1977, Cell 11:223), hypoxanthine-guanine phosphoribosyltransferase (Szybalska & Szybalski, 1962, Proc. Natl. Acad. Sci. USA 48:2026), and adenine phosphoribosyltransferase (Lowy et al., 1980, Cell 22:817) genes can be employed in tk⁻, hgprt⁻or aprt⁻cells, respectively. Also, antimetabolite resistance can be used as the basis of selection for the following genes: dhfr, which confers resistance to methotrexate (Wigler et al., 1980, Natl. Acad. Sci. USA 77:3567; O'Hare et al., 1981, Proc. Natl. Acad. Sci. USA 78:1527); gpt, which confers resistance to mycophenolic acid (Mulligan & Berg, 1981, Proc. Natl. Acad. Sci. USA 78:2072); neo, which confers resistance to the aminoglycoside G-418 (Colberre-Garapin et al., 1981, J. Mol. Biol. 150:1); and hygro, which confers resistance to hygromycin (Santerre et al., 1984, Gene 30:147).

[0069] The novel gene products/peptide sequences encoded by the described novel GTSs are also useful as epitope tags for the antigenic or other tagging of proteins and polypeptides that have been engineered to incorporate or comprise at least a portion of an GTS peptide sequence.

[0070] The gene products of interest can also be expressed in transgenic animals. Animals of any species, including, but not limited to, mice, rats, rabbits, guinea pigs, pigs, micro-pigs, goats, and non-human primates, e.g., baboons, monkeys, and chimpanzees may be used to generate transgenic animals carrying the polynucleotide of interest of the current invention.

[0071] Any technique known in the art may be used to introduce the transgene of interest into animals to produce the founder lines of transgenic animals. Such techniques include, but are not limited to pronuclear microinjection (Hoppe, P. C. and Wagner, T. E., 1989, U.S. Pat. No. 4,873,191); retrovirus mediated gene transfer into germ lines (Van der Putten et al., 1985, Proc. Natl. Acad. Sci., USA 82:6148-6152); gene targeting in embryonic stem cells (Thompson et al., 1989, Cell 56:313-321); electroporation of embryos (Lo, 1983, Mol Cell. Biol. 3:1803-1814); sperm-mediated gene transfer (Lavitrano et al., 1989, Cell 57:717-723); positive-negative selection as described in U.S. Pat. No. 5,464,764 herein incorporated by reference. For a review of such techniques, see Gordon, 1989, Transgenic Animals, Intl. Rev. Cytol. 115:171-229, which is incorporated by reference herein in its entirety.

[0072] The present invention provides for transgenic animals that carry the transgene of interest in all their cells, as well as animals which carry the transgene in some, but not all their cells, i.e., mosaic animals. The transgene may be integrated as a single transgene or in concatamers, e.g., head-to-head tandems or head-to-tail tandems. The transgene may also be selectively introduced into and activated in a particular cell type by following, for example, the teaching of Lasko et al. (Lasko, M. et al., 1992, Proc. Natl. Acad. Sci. USA 89:6232-6236). The regulatory sequences required for such a cell-type specific activation will depend upon the particular cell type of interest, and will be apparent to those of skill in the art. When it is desired that the transgene of interest be integrated into the chromosomal site of the endogenous copy of that same gene, gene targeting is preferred. Briefly, when such a technique is to be utilized, vectors containing some nucleotide sequences homologous to the endogenous gene of interest are designed for the purpose of integrating, via homologous recombination with chromosomal sequences, into and disrupting the function of the nucleotide sequence of the endogenous gene of interest. In this way, the expression of the endogenous gene may also be eliminated by inserting non-functional sequences into the endogenous gene. The transgene may also be selectively introduced into a particular cell type, thus inactivating the endogenous gene of interest in only that cell type, by following, for example, the teaching of Gu et al. (Gu et al., 1994, Science 265: 103-106). The regulatory sequences required for such a cell-type specific inactivation will depend upon the particular cell type of interest, and will be apparent to those of skill in the art.

[0073] Once transgenic animals have been generated, the expression of the recombinant gene of interest may be assayed utilizing standard techniques. Initial screening may be accomplished by Southern blot analysis or PCR techniques to analyze animal tissues to assay whether integration of the transgene has taken place. The level of mRNA expression of the transgene in the tissues of the transgenic animals may also be assessed using techniques which include but are not limited to Northern blot analysis of cell type samples obtained from the animal, in situ hybridization analysis, and RT-PCR. Samples of gene-expressing tissue, can also be evaluated immunocytochemically using antibodies specific for the transgene product, as described below.

### 5.3. CELLS THAT CONTAIN A DISRUPTED ALLELE OF A GENE ENCODING A POLYNUCLEOTIDE OF THE CURRENT INVENTION

[0074] Another aspect of the current invention are cells which contain a gene that encodes a polynucleotide of the current invention and that has been disrupted. Those of skill in the art would know how to disrupt a gene in a cell using techniques known in the art. Also, techniques useful to disrupt a gene in a cell and especially an ES cell, that may already be disrupted, as disclosed in copending U.S. patent applications Ser. Nos. 08/726,867; 08/728,963; 08/907,598; and 08/942,806, all of which are hereby incorporated herein by reference in their entirety, are within the scope of the current invention to disrupt a gene that encodes a polynucleotide of the current invention.

### 5.3.1 IDENTIFICATION OF CELLS THAT EXPRESS GENES ENCODING POLYNUCLEOTIDES OF THE CURRENT INVENTION

[0075] Host cells that contain coding sequence and/or express a biologically active gene product, or fragment thereof, encoded by gene corresponding to an GTS of the present, invention may be identified by at least four general approaches; (a) DNA-DNA or DNA-RNA hybridization; (b) the presence or absence of “marker” gene functions; (c) assessing the level of transcription as measured by the expression of mRNA transcripts in the host cell; and (d) detection of the gene product as measured by immunoassay, enzymatic assay, chemical assay, or by its biological activity. Prior to screening for gene expression, the host cells can first be treated in an effort to increase the level of expression of genes encoding polynucleotides of the current invention, especially in cell lines that produce low amounts of the mRNAs and/or peptides and proteins of the current invention.

[0076] In the first approach, the presence of the coding sequence for peptides and proteins of the current invention inserted in the expression vector can be detected by DNA-DNA or DNA-RNA hybridization using probes comprising nucleotide sequences that are homologous to the coding sequence for peptides and proteins of the current invention, respectively, or portions or derivatives thereof.

[0077] In the second approach, the recombinant expression vector/host system can be identified and selected based upon the presence or absence of certain “marker” gene functions (e.g., thymidine kinase activity, resistance to antibiotics, resistance to methotrexate, transformation phenotype, occlusion body formation in baculovirus, etc.). For example, if the coding sequence for the peptide or protein of the current invention is inserted within a marker gene sequence of the vector, recombinants containing the coding sequence for the peptide or protein of the current invention can be identified by the absence of marker gene function. Alternatively, a marker gene can be placed in tandem with the sequence for the peptide or protein of the current invention under the control of the same or different promoter used to control the expression of the coding sequence for the peptide or protein of the current invention. Expression of the marker in response to induction or selection indicates expression of the coding sequence for the peptide or protein of the current invention.

[0078] In the third approach, transcriptional activity for the coding region of genes specific for peptides and proteins of the current invention can be assessed by hybridization assays. For example, RNA can be isolated and analyzed by Northern blot using a probe derived from a GTS, or any portion thereof. Alternatively, total nucleic acids of the host cell may be extracted and assayed for hybridization to such probes. Additionally, RT-PCR (using GTS specific oligos/products) may be used to detect low levels of gene expression in a sample, or in RNA isolated from a spectrum of different tissues, or PCR can be used can be used to screen a variety of cDNA libraries derived from different tissues to determine which tissues express a given GTS.

[0079] In the fourth approach, the expression of the peptides and proteins of the current invention can be assessed immunologically, for example by Western blots, immunoassays such as radioimmuno-precipitation, enzyme-linked immunoassays and the like. This can be achieved by using an antibody and a binding partner specific to a peptide or protein of the current invention.

### 5.4. ANTIBODIES TO PROTEINS OF THE CURRENT INVENTION

[0080] Antibodies that specifically recognize one or more epitopes of a peptide or protein encoded by the GTSs of the present invention, or epitopes of conserved variants of these peptides or proteins, or any and all peptide fragments thereof are also encompassed by the invention. Such antibodies include but are not limited to polyclonal antibodies, monoclonal antibodies (mAbs), humanized or chimeric antibodies, single chain antibodies, Fab fragments, F(ab′)₂ fragments, fragments produced by a Fab expression library, anti-idiotypic (anti-Id) antibodies, and epitope-binding fragments of any of the above.

[0081] The antibodies of the invention may be used, for example, in the detection of the peptide or protein of interest of the current invention in a biological sample and may, therefore, be utilized as part of a diagnostic or prognostic technique whereby patients may be tested for abnormal amounts of these proteins. Such antibodies may also be utilized in conjunction with, for example, compound screening schemes as described, below in Section 5.6 for the evaluation of the effect of test compounds on expression and/or activity of the gene products of interest of the current invention. Additionally, such antibodies can be used in conjunction with the gene therapy and gene delivery techniques described below to, for example, evaluate the normal and/or engineered peptide- or protein-expressing cells prior to their introduction into the patient. Such antibodies may additionally be used in a method for inhibiting the abnormal activity of a peptide or protein of interest of the current invention. Thus, such antibodies may, for example, be utilized as part of treatment methods for development and cell differentiation disorders.

[0082] For the production of antibodies, various host animals may be immunized by injection with the peptide or protein of interest, a subunit peptide of such protein, a truncated polypeptide, functional equivalents of the peptide or protein, mutants of the peptide or protein, or denatured forms of the above. Such host animals may include but are not limited to rabbits, mice, and rats, to name but a few. Various adjuvants may be used to increase the immunological response, depending on the host species, including but not limited to Freund's adjuvant (complete and incomplete), mineral saltssuch as, aluminum hydroxide or aluminum phosphate, surface active substances such as lysolecithin, pluronic polyols, polyanions, peptides, oil emulsions, and potentially useful human adjuvants such as BCG (bacille Calmette-Guerin) and Corynebacterium parvum. Alternatively, the immune response could be enhanced by combination and or coupling with molecules such as keyhole limpet hemocyanin, tetanus toxoid, diptheria toxoid, ovalbumin, cholera toxin or fragments thereof. Polyclonal antibodies are heterogeneous populations of antibody molecules derived from the sera of the immunized animals.

[0083] Monoclonal antibodies, which are homogeneous populations of antibodies to a particular antigen, may be obtained by any technique which provides for the production of antibody molecules by continuous cell lines in culture. These include, but are not limited to, the hybridoma technique of Kohler and Milstein, (1975, Nature 256:495-497; and U.S. Pat. No. 4,376,110), the human B-cell hybridoma technique (Kosbor et al., 1983, Immunology Today 4:72; Cole et al., 1983, Proc. Natl. Acad. Sci. USA 80:2026-2030), and the EBV-hybridoma technique (Cole et al., 1985, Monoclonal Antibodies And Cancer Therapy, Alan R. Liss, Inc., pp. 77-96). Such antibodies may be of any immunoglobulin class including IgG, IgM, IgE, IgA, IgD and any subclass thereof. The hybridoma producing the mAb of this invention may be cultivated in vitro or in vivo. Production of high titers of mAbs in vivo makes this the presently preferred method of production.

[0084] In addition, techniques developed for the production of “chimeric antibodies” (Morrison et al., 1984, Proc. Natl. Acad. Sci. USA, 81:6851-6855; Neuberger et al., 1984, Nature, 312:604-608; Takeda et al., 1985, Nature, 314:452-454) by splicing the genes from a mouse antibody molecule of appropriate antigen specificity together with genes from a human antibody molecule of appropriate biological activity can be used. A chimeric antibody is a molecule in which different portions are derived from different animal species, such as those having a variable region derived from a porcine mAb and a human immunoglobulin constant region. Such technologies are described in U.S. Pat. Nos. 6,075,181 and 5,877,397 and their respective disclosures which are herein incorporated by reference in their entirety.

[0085] Alternatively, techniques described for the production of single chain antibodies (U.S. Pat. No. 4,946,778; Bird, 1988, Science 242:423-426; Huston et al., 1988, Proc. Natl. Acad. Sci. USA 85:5879-5883; and Ward et al., 1989, Nature 341:544-546) can be adapted to produce single chain antibodies against gene products of interest. Single chain antibodies are formed by linking the heavy and light chain fragments of the Fv region via an amino acid bridge, resulting in a single chain polypeptide.

[0086] Antibody fragments which recognize specific epitopes may be generated by known techniques. For example, such fragments include but are not limited to: the F(ab′)₂ fragments which can be produced by pepsin digestion of the antibody molecule and the Fab fragments which can be generated by reducing the disulfide bridges of the F(ab′)₂ fragments. Alternatively, Fab expression libraries may be constructed (Huse et al., 1989, Science, 246:1275-1281) to allow rapid and easy identification of monoclonal Fab fragments with the desired specificity.

[0087] Antibodies to peptides and proteins of interest that fully or at least partially encoded by GTSs of the current invention or fragments or truncated versions thereof, can, in turn, be utilized to generate anti-idiotypic antibodies that “mimic” an epitope of the peptide or protein of interest, using techniques well known to those skilled in the art. (See, e.g., Greenspan & Bona, 1993, FASEB J 7(5):437-444; and Nissinoff, 1991, J. Immunol. 147(8):2429-2438). For example antibodies that bind to a regulatory peptide or protein of interest of the current invention and competitively inhibit the binding of such peptide or protein to any of its binding partners in the cell can be used to generate anti-idiotypes that “mimic” the peptide or protein of interest and, therefore, bind and neutralize the particular binding partner of the peptide or protein of interest. Such neutralizing anti-idiotypes or Fab fragments of such anti-idiotypes can be used in therapeutic regimens to neutralize a particular binding partner of a peptide or protein of interest which play a role in development and cell differentiation processes.

[0088] An additional use for the presently described knockout cells and animals is the generation of high affinity antibodies against mammalian proteins. Given that the described knockout animals will have never have seen the proteins expressed by the disrupted genes, the mutated animals can recognize mammalian orthologous proteins (including highly homologous human proteins) as foreign and mount an immune response against such proteins whereas nonmutated animals might not. Such mammalian antibodies can be humanized using readily available means and used as therapeutic agents.

### 5.5. DIAGNOSIS OF DISORDERS AFFECTING DEVELOPMENT AND CELL DIFFERENTIATION

[0089] A variety of methods can be employed for the diagnostic and prognostic evaluation of disorders involving developmental and differentiation processes, and for the identification of subjects having a predisposition to such disorders.

[0090] Such methods may, for example, utilize reagents such as the nucleotide sequences described above, and antibodies to peptides and proteins of the current invention, as described, in Section 5.4. Specifically, such reagents may be used, for example, for: (1) the detection of the presence of gene mutations, or the detection of either over- or under-expression of the respective mRNAs relative to the non-disorder state; (2) the detection of either an over- or an under-abundance of the respective gene product relative to the non-disorder state; and (3) the detection of perturbations or abnormalities in the intra- and inter-cellular processes mediated by the respective peptides or proteins of the current invention.

[0091] The methods described herein may be performed, for example, by utilizing pre-packaged diagnostic kits comprising at least one specific nucleotide sequence of the current invention or antibody reagent described herein, which may be conveniently used, e.g., in clinical settings, to diagnose patients exhibiting developmental or cell differentiation disorder abnormalities.

[0092] For the detection of mutations in any of the genes described above, any nucleated cell can be used as a starting source for genomic nucleic acid. For the detection of gene expression or gene products, any cell type or tissue in which the gene of interest is expressed, such as, for example, ES cells, may be utilized. Specific examples of cells and tissues that can be analyzed using the claimed polynucleotides include, but are not limited to, endothelial cells, epithelial cells, islets, neurons or neural tissue, mesothelial cells, osteocytes, lymphocytes, chondrocytes, hematopoietic cells, immune cells, cells of the major glands or organs (e.g., lung, heart, stomach, pancreas, kidney, skin, etc.), exocrine and/or endocrine cells, embryonic and other stem cells, fibroblasts, and culture adapted and/or transformed versions of the above. Diseases or natural processes that can also be correlated with the expression of mutant, or normal, variants of the disclosed GTSs include, but are not limited to, aging, cancer, autoimmune disease, lupus, scleroderma, Crohn's disease, multiple sclerosis, inflammatory bowel disease, immune disorders, schizophrenia, psychosis, alopecia, glandular disorders, inflammatory disorders, ataxia telangiectasia, diabetes, skin disorders such as acne, eczema, and the like, osteo and rheumatoid arthritis, high blood pressure, atherosclerosis, cardiovascular disease, pulmonary disease, degenerative diseases of the neural or skeletal systems, Alzheimer's disease, Parkinson's disease, osteoporosis, asthma, developmental disorders or abnormalities, genetic birth defects, infertility, epithelial ulcerations, and viral, parasitic, fungal, yeast, or bacterial infection.

[0093] Primary, secondary, or culture adapted variants of cancer cells/tissues can also be analyzed using the claimed polynucleotides. Examples of such cancers include, but are not limited to, Cardiac: sarcoma (angiosarcoma, fibrosarcoma, rhabdomyosarcoma, liposarcoma), myxoma, rhabdomyoma, fibroma, lipoma and teratoma; Lung: bronchogenic carcinoma (squamous cell, undifferentiated small cell, undifferentiated large cell, adenocarcinoma), alveolar (bronchiolar) carcinoma, bronchial adenoma, sarcoma, lymphoma, chondromatous hamartoma, mesothelioma; Gastrointestinal: esophagus (squamous cell carcinoma, adenocarcinoma, leiomyosarcoma, lymphoma), stomach (carcinoma, lymphoma, leiomyosarcoma), pancreas (ductal adenocarcinoma, insulinoma, glucagonoma, gastrinoma, carcinoid tumors, vipoma), small bowel (adenocarcinoma, lymphoma, carcinoid tumors, Karposi's sarcoma, leiomyoma, hemangioma, lipoma, neurofibroma, fibroma), large bowel (adenocarcinoma, tubular adenoma, villous adenoma, hamartoma, leiomyoma); Genitourinary tract: kidney (adenocarcinoma, Wilm's tumor [nephroblastoma], lymphoma, leukemia), bladder and urethra (squamous cell carcinoma, transitional cell carcinoma, adenocarcinoma), prostate (adenocarcinoma, sarcoma), testis (seminoma, teratoma, embryonal carcinoma, teratocarcinoma, choriocarcinoma, sarcoma, interstitial cell carcinoma, fibroma, fibroadenoma, adenomatoid tumors, lipoma); Liver: hepatoma (hepatocellular carcinoma), cholangiocarcinoma, hepatoblastoma, angiosarcoma, hepatocellular adenoma, hemangioma; Bone: osteogenic sarcoma (osteosarcoma), fibrosarcoma, malignant fibrous histiocytoma, chondrosarcoma, Ewing's sarcoma, malignant lymphoma (reticulum cell sarcoma), multiple myeloma, malignant giant cell tumor, chordoma, osteochronfroma (osteocartilaginous exostoses), benign chondroma, chondroblastoma, chondromyxofibroma, osteoid osteoma and giant cell tumors; Nervous system: skull (osteoma, hemangioma, granuloma, xanthoma, osteitis deformans), meninges (meningioma, meningiosarcoma, gliomatosis), brain (astrocytoma, medulloblastoma, glioma, ependymoma, germinoma [pinealoma], glioblastoma multiforme, oligodendroglioma, schwannoma, retinoblastoma, congenital tumors), spinal cord (neurofibroma, meningioma, glioma, sarcoma); Gynecological: uterus (endometrial carcinoma), cervix (cervical carcinoma, pre-tumor cervical dysplasia), ovaries (ovarian carcinoma [serous cystadenocarcinoma, mucinous cystadenocarcinoma, endometrioid tumors, celioblastoma, clear cell carcinoma, unclassified carcinoma], granulosa-thecal cell tumors, Sertoli-Leydig cell tumors, dysgerminoma, malignant teratoma), vulva (squamous cell carcinoma, intraepithelial carcinoma, adenocarcinoma, fibrosarcoma, melanoma), vagina (clear cell carcinoma, squamous cell carcinoma, botryoid sarcoma [embryonal rhabdomyosarcoma], fallopian tubes (carcinoma); Hematologic: blood (myeloid leukemia [acute and chronic], acute lymphoblastic leukemia, chronic lymphocytic leukemia, myeloproliferative diseases, multiple myeloma, myelodysplastic syndrome), Hodgkin's disease, non-Hodgkin's lymphoma [malignant lymphoma]; Skin: malignant melanoma, basal cell carcinoma, squamous cell carcinoma, Karposi's sarcoma, moles, dysplastic nevi, lipoma, angioma, dermatofibroma, keloids, psoriasis; Breast: carcinoma and sarcoma, and Adrenal glands: neuroblastoma.

[0094] Nucleic acid-based detection techniques and peptide detection techniques that can be used to conduct the above analyses are described below.

### 5.5.1. DETECTION OF THE GENES OF THE CURRENT INVENTION AND THEIR RESPECTIVE TRANSCRIPTS

[0095] Mutations within the genes of the current invention can be detected by utilizing a number of techniques. Nucleic acid from any nucleated cell can be used as the starting point for such assay techniques, and may be isolated according to standard nucleic acid preparation procedures which are well known to those of skill in the art.

[0096] DNA may be used in hybridization or amplification assays of biological samples to detect abnormalities involving gene structure, including point mutations, insertions, deletions and chromosomal rearrangements. Such assays may include, but are not limited to, Southern analyses, single stranded conformational polymorphism analyses (SSCP), and PCR analyses.

[0097] Such diagnostic methods for the detection of gene-specific mutations can involve for example, contacting and incubating nucleic acids including recombinant DNA molecules, cloned genes or degenerate variants thereof, obtained from a sample, e.g., derived from a patient sample or other appropriate cellular source, with one or more labeled nucleic acid reagents including recombinant DNA molecules, cloned genes or degenerate variants thereof, as described above, under conditions favorable for the specific annealing of these reagents to their complementary sequences within the gene of interest of the current invention. Preferably, the lengths of these nucleic acid reagents are at least 15 to 30 nucleotides. After incubation, all non-annealed nucleic acids are removed from the nucleic acid molecule hybrid. The presence of nucleic acids which have hybridized, if any such molecules exist, is then detected. Using such a detection scheme, the nucleic acid from the cell type or tissue of interest can be immobilized, for example, to a solid support such as a membrane, or a plastic surface such as that on a microtiter plate or polystyrene beads. In this case, after incubation, non-annealed, labeled nucleic acid reagents of the type described above are easily removed. Detection of the remaining, annealed, labeled nucleic acid reagents is accomplished using standard techniques well-known to those in the art. The gene sequences to which the nucleic acid reagents have annealed can be compared to the annealing pattern expected from a normal gene sequence in order to determine whether a gene mutation is present.

[0098] Alternative diagnostic methods for the detection of gene specific nucleic acid molecules, in patient samples or other appropriate cell sources, may involve their amplification, e.g., by PCR (the experimental embodiment set forth in Mullis, K. B., 1987, U.S. Pat. No. 4,683,202), followed by the detection of the amplified molecules using techniques well known to those of skill in the art. The resulting amplified sequences can be compared to those which would be expected if the nucleic acid being amplified contained only normal copies of the respective gene in order to determine whether a gene mutation exists.

[0099] Additionally, well-known genotyping techniques can be performed to identify individuals carrying mutations in any of the genes of the current invention. Such techniques include, for example, the use of restriction fragment length polymorphisms (RFLPs), which involve sequence variations in one of the recognition sites for the specific restriction enzyme used.

[0100] Furthermore, the polynucleotide sequences of the current invention may be mapped to chromosomes and specific regions of chromosomes using well known genetic and/or chromosomal mapping techniques. These techniques include in situ hybridization, linkage analysis against known chromosomal markers, hybridization screening with libraries or flow-sorted chromosomal preparations specific to known chromosomes, and the like. The technique of fluorescent in situ hybridization of chromosome spreads has been described, for example, in Verma et al. (1988) Human Chromosomes: A Manual of Basic Techniques, Pergamon Press, New York. Fluorescent in situ hybridization of chromosomal preparations and other physical chromosome mapping techniques may be correlated with additional genetic map data. Examples of genetic map data can be found, for example, in Genetic Maps: Locus Maps of Complex Genomes, Book 5: Human Maps, O'Brien, editor, Cold Spring Harbor Laboratory Press (1990). Comparisons of physical chromosomal map data may be of particular interest in detecting genetic diseases in carrier states.

[0101] The level of expression of genes can also be assayed by detecting and measuring the transcription of such genes. For example, RNA from a cell type or tissue known, or suspected to express any of the genes of the current invention can be isolated and tested utilizing hybridization or PCR techniques (e.g., northern or RT PCR) such as those described, above. Such analyses may reveal both quantitative and qualitative aspects of the expression pattern of the respective gene, including activation or inactivation of gene expression. In situ hybridization using suitably radioactively or enzymatically labeled forms of the described polynucleotide sequences can also be used to assess expression patterns in vivo.

[0102] Additionally, an oligonucleotide or polynucleotide sequence first disclosed in at least a portion of one or more of the GTS sequences of SEQ ID NOS: 1-1,159 can be used as a hybridization probe in conjunction with a solid support matrix/substrate (resins, beads, membranes, plastics, polymers, metal or metallized substrates, crystalline or polycrystalline substrates, etc.). Of particular note are spatially addressable arrays (i.e., gene chips, microtiter plates, etc.) of oligonucleotides and polynucleotides, or corresponding oligopeptides and polypeptides, wherein at least one of the biopolymers present on the spatially addressable array comprises an oligonucleotide or polynucleotide sequence first disclosed in at least one of the GTS sequences of SEQ ID NOS: 1-1,159, or an amino acid sequence encoded thereby. Methods for attaching biopolymers to, or synthesizing biopolymers on, solid support matrices, and conducting binding studies, thereon are disclosed in, inter alia, U.S. Pat. Nos. 5,700,637, 5,556,752, 5,744,305, 4,631,211, 5,445,934, 5,252,743, 4,713,326, 5,424,186, and 4,689,405 the disclosures of which are herein incorporated by reference in their entirety.

[0103] Addressable arrays comprising sequences first disclosed in SEQ ID NOS:1-1,159 can be used to identify and characterize the temporal and tissue specific expression of a gene. These addressable arrays incorporate oligonucleotide sequences of sufficient length to confer the required specificity, yet be within the limitations of the production technology. The length of these probes is within a range of between about 8 to about 2000 nucleotides. Preferably the probes consist of 60 nucleotides and more preferably 25 nucleotides from the sequences first disclosed in SEQ ID NOS:1-1,159.

[0104] For example, a series of the described GTS oligonucleotide sequences, or the complements thereof, can be used in chip format to represent all or a portion of the described GTS sequences. The oligonucleotides, typically between about 16 to about 40 (or any whole number within the stated range) nucleotides in length can partially overlap each other and/or the GTS sequence may be represented using oligonucleotides that do not overlap. Accordingly, the described GTS polynucleotide sequences shall typically comprise at least about two or three distinct oligonucleotide sequences of at least about 8 nucleotides in length that are each first disclosed in the described Sequence Listing. Such oligonucleotide sequences can begin at any nucleotide present within a sequence in the Sequence Listing and proceed in either a sense (5′-to-3′) orientation vis-a-vis the described sequence or in an antisense orientation.

[0105] Microarray-based analysis allows the discovery of broad patterns of genetic activity, providing new understanding of gene functions and generating novel and unexpected insight into transcriptional processes and biological mechanisms. The use of addressable arrays comprising sequences first disclosed in SEQ ID NOS:1-1,159 provides detailed information about transcriptional changes involved in a specific pathway, potentially leading to the identification of novel components or gene functions that manifest themselves as novel phenotypes.

[0106] Probes consisting of sequences first disclosed in SEQ ID NOS:1-1,159 can also be used in the identification, selection and validation of novel molecular targets for drug discovery. The use of these unique sequences permits the direct confirmation of drug targets and recognition of drug dependent changes in gene expression that are modulated through pathways distinct from the drugs intended target. These unique sequences therefore also have utility in defining and monitoring both drug action and toxicity.

[0107] As an example of utility, the sequences first disclosed in SEQ ID NOS:1-1,159 can be utilized in microarrays or other assay formats, to screen collections of genetic material from patients who have a particular medical condition. These investigations can also be carried out using the sequences first disclosed in SEQ ID NOS:1-1,159 in silico and by comparing previously collected genetic databases and the disclosed sequences using computer software known to those in the art.

[0108] Thus the sequences first disclosed in SEQ ID NOS:1-1,159 can be used to identify mutations associated with a particular disease and also as a diagnostic or prognostic assay.

[0109] Although the presently described GTSs have been specifically described using nucleotide sequence, it should be appreciated that each of the GTSs can uniquely be described using any of a wide variety of additional structural attributes, or combinations thereof. For example, a given GTS can be described by the net composition of the nucleotides present within a given region of the GTS in conjunction with the presence of one or more specific oligonucleotide sequence(s) first disclosed in the GTS. Alternatively, a restriction map specifying the relative positions of restriction endonuclease digestion sites, or various palindromic or other specific oligonucleotide sequences can be used to structurally describe a given GTS. Such restriction maps, which are typically generated by widely available computer programs (e.g., the University of Wisconsin GCG sequence analysis package, SEQUENCHER 3.0, Gene Codes Corp., Ann Arbor, Mich., etc.), can optionally be used in conjunction with one or more discrete nucleotide sequence(s) present in the GTS that can be described by the relative position of the sequence relative to one or more additional sequence(s) or one or more restriction sites present in the GTS.

### 5.5.2. DETECTION OF THE GENE PRODUCTS OF THE CURRENT INVENTION

[0110] Antibodies directed against wild type or mutant gene products of the current invention or conserved variants or peptide fragments thereof, which are discussed above in Section 5.4 may also be used as diagnostics and prognostics for disorders affecting development and cellular differentiation, as described herein. Such diagnostic methods, may be used to detect abnormalities in the level of gene expression, or abnormalities in the structure and/or temporal, tissue, cellular, or subcellular location of the respective gene product, and may be performed in vivo or in vitro, such as, for example, on biopsy tissue.

[0111] The tissue or cell type to be analyzed will generally include those which are known, or suspected, to contain cells that express the respective gene. The protein isolation methods employed herein may, for example, be such as those described in Harlow and Lane (Harlow, E. and Lane, D., 1988, “Antibodies: A Laboratory Manual”, Cold Spring Harbor Laboratory Press, Cold Spring Harbor, N.Y.), which is incorporated herein by reference in its entirety. The isolated cells can be derived from cell culture or from a patient. The analysis of cells taken from culture may be a necessary step in the assessment of cells that could be used as part of a cell-based gene therapy technique or, alternatively, to test the effect of compounds on the expression of the respective gene.

[0112] For example, antibodies, or fragments of antibodies, such as those described above in Section 5.4 are also useful in the present invention to quantitatively or qualitatively detect the presence of gene products of the current invention or conserved variants or peptide fragments thereof. This can be accomplished, for example, by immunofluorescence techniques employing a fluorescently labeled antibody (see below, this Section) coupled with light microscopic, flow cytometric, or fluorimetric detection.

[0113] The antibodies (or fragments thereof) or fusion or conjugated proteins useful in the present invention may, additionally, be employed histologically, as in immunofluorescence, immunoelectron microscopy or non-immuno assays, for in situ detection of gene products of the current invention or conserved variants or peptide fragments thereof, or for catalytic subunit binding (in the case of labeled catalytic subunit fusion protein).

[0114] In situ detection may be accomplished by removing a histological specimen from a patient, and applying thereto a labeled antibody or fusion protein of the present invention. The antibody (or fragment) or fusion protein is preferably applied by overlaying the labeled antibody (or fragment) onto a biological sample. Through the use of such a procedure, it is possible to determine not only the presence of the gene product of the current invention, or conserved variants or peptide fragments, but also its distribution in the examined tissue. Using the present invention, those of ordinary skill will readily perceive that any of a wide variety of histological methods (such as staining procedures) can be modified in order to achieve such in situ detection.

[0115] Immunoassays and non-immunoassays for gene products of the current invention or conserved variants or peptide fragments thereof will typically comprise incubating a sample, such as a biological fluid, a tissue extract, freshly harvested cells, or lysates of cells which have been incubated in cell culture, in the presence of a detectably labeled antibody capable of identifying the respective gene products of interest or conserved variants or peptide fragments thereof, and detecting the bound antibody by any of a number of techniques well-known in the art.

[0116] The biological sample may be brought in contact with and immobilized onto a solid phase support or carrier such as nitrocellulose, or other solid support which is capable of immobilizing cells, cell particles or soluble proteins. The support may then be washed with suitable buffers followed by treatment with the detectably labeled antibody specific to the peptide or protein of interest of the current invention or with fusion protein. The solid phase support may then be washed with the buffer a second time to remove unbound antibody or fusion protein. The amount of bound label on solid support may then be detected by conventional means.

[0117] “Solid phase support or carrier” is intended to encompass any support capable of binding an antigen or an antibody. Well-known supports or carriers include glass, polystyrene, polypropylene, polyethylene, dextran, nylon, amylases, natural and modified celluloses, polyacrylamides, gabbros, and magnetite. The nature of the carrier can be either soluble to some extent or insoluble for the purposes of the present invention. The support material may have virtually any possible structural configuration so long as the coupled molecule is capable of binding to an antigen or antibody. Thus, the support configuration may be spherical, as in a bead, or cylindrical, as in the inside surface of a test tube, or the external surface of a rod. Alternatively, the surface may be flat such as a sheet, test strip, etc. Preferred supports include polystyrene beads. Those skilled in the art will know many other suitable carriers for binding antibody or antigen, or will be able to ascertain the same by use of routine experimentation.

[0118] The binding activity of a given lot of antibody or fusion protein may be determined according to well known methods. Those skilled in the art will be able to determine operative and optimal assay conditions for each determination by employing routine experimentation.

[0119] With respect to antibodies, one of the ways in which the antibody can be detectably labeled is by linking the same to an enzyme and use in an enzyme immunoassay (EIA) (Voller, “The Enzyme Linked Immunosorbent Assay (ELISA)”, 1978, Diagnostic Horizons 2:1-7, Microbiological Associates Quarterly Publication, Walkersville, Md.); Voller et al., 1978, J. Clin. Pathol. 31:507-520; Butler, 1981, Meth. Enzymol. 73:482-523; Maggio (ed.), 1980, Enzyme Immunoassay, CRC Press, Boca Raton, Fla.,; Ishikawa et al., (eds.), 1981, Enzyme Immunoassay, Kgaku Shoin, Tokyo). The enzyme which is bound to the antibody will react with an appropriate substrate, preferably a chromogene substrate, in such a manner as to produce a chemical moiety which can be detected, for example, by spectrophotometric, fluorimetric or by visual means. Enzymes which can be used to detectably label the antibody include, but are not limited to, malate dehydrogenase, staphylococcal nuclease, delta-5-steroid isomerase, yeast alcohol dehydrogenase, alpha-glycerophosphate, dehydrogenase, triose phosphate isomerase, horseradish peroxidase, alkaline phosphatase, asparaginase, glucose oxidase, beta-galactosidase, ribonuclease, urease, catalase, glucose-6-phosphate dehydrogenase, glucoamylase and acetylcholinesterase. The detection can be accomplished by colorimetric methods which employ a chromogenic substrate for the enzyme. Detection may also be accomplished by visual comparison of the extent of enzymatic reaction of a substrate in comparison with similarly prepared standards.

[0120] Detection may also be accomplished using any of a variety of other immunoassays. For example, by radioactively labeling the antibodies or antibody fragments, it is possible to detect the peptide or protein of interest through the use of a radioimmunoassay (RIA) (see, for example, Weintraub, B., Principles of Radioimmunoassays, Seventh Training Course on Radioligand Assay Techniques, The Endocrine Society, March, 1986, which is incorporated by reference herein). The radioactive isotope can be detected by such means as the use of a gamma counter or a scintillation counter or by autoradiography.

[0121] It is also possible to label the antibody with a fluorescent compound. When the fluorescently labeled antibody is exposed to light of the proper wave length, its presence can then be detected due to fluorescence. Among the most commonly used fluorescent labeling compounds are fluorescein isothiocyanate, rhodamine, phycoerythrin, phycocyanin, allophycocyanin and fluorescamine.

[0122] The antibody can also be detectably labeled using fluorescence emitting metals such as ¹⁵²Eu, or others of the lanthanide series. These metals can be attached to the antibody using such metal chelating groups as diethylenetriaminepentaacetic acid (DTPA) or ethylenediaminetetraacetic acid (EDTA).

[0123] The antibody also can be detectably labeled by coupling it to a chemiluminescent compound. The presence of the chemiluminescent-tagged antibody is then determined by detecting the presence of luminescence that arises during the course of a chemical reaction. Examples of particularly useful chemiluminescent labeling compounds are luminol, isoluminol, theromatic acridinium ester, imidazole, acridinium salt and oxalate ester.

[0124] Likewise, a bioluminescent compound may be used to label the antibody of the present invention. Bioluminescence is a type of chemiluminescence found in biological systems in, which a catalytic protein increases the efficiency of the chemiluminescent reaction. The presence of a bioluminescent protein is determined by detecting the presence of luminescence. Important bioluminescent compounds for purposes of labeling are luciferin, luciferase and aequorin.

[0125] An additional use of a peptide or polypeptide encoded by an oligonucleotide or polynucleotide sequence first disclosed in at least one of the GTS sequences of SEQ ID NOS: 1-1,159 involves incorporating the sequence into a phage display, or other peptide library/binding, system that can be used to screen for proteins, or other ligands, that are capable of binding to an amino acid sequence encoded by an oligonucleotide or polynucleotide sequence first disclosed in at least one of the GTS sequences of SEQ ID NOS: 1-1,159 (see U.S. Pat. Nos. 5,270,170, and 5,432,018, herein incorporated by reference in their entirety). Moreover, peptide arrays comprising a novel amino acid sequence corresponding to a portion of at least one of the polynucleotide sequences first disclosed in SEQ ID NOS: 1-1,159 can be generated and screened essentially as described in U.S. Pat. Nos. 5,143,854, 5,405,783, and 5,252,743, the complete disclosures of which are herein incorporated by references.

[0126] Additionally, the presently described GTSs, or primers derived therefrom, can be used to screen spatially addressable arrays, or pools therefrom, of clones present in a full-length human cDNA library. The 96 well microtiter plate format is especially well suited to the screening, by PCR for example, of pooled subfractions of cDNA clones.

### 5.6. SCREENING ASSAYS FOR COMPOUNDS THAT MODULATE THE EXPRESSION OR ACTIVITY OF PEPTIDES AND PROTEINS OF THE CURRENT INVENTION

[0127] The following assays are designed to identify compounds that interact with (e.g., bind to) peptides and proteins at least partially encoded by one of SEQ ID NOS: 1-1,159 (i.e. peptides or proteins of the current invention) compounds that interact with (e.g., bind to) intracellular proteins that interact with peptides and proteins of the current invention, compounds that interfere with the interaction of peptides and proteins of the current invention with each other and with other intracellular proteins involved in developmental and cell differentiation processes, and to compounds which modulate the activity of genes of the current invention (i.e., modulate the level of expression of genes of the current invention) or modulate the level of gene products of the current invention. Assays may additionally be utilized which identify compounds which bind to gene regulatory sequences (e.g., promoter sequences) and which may modulate the expression of genes of the current invention. See e.g., Platt, K. A., 1994, J. Biol. Chem. 269:28558-28562, which is incorporated herein by reference in its entirety.

[0128] Compounds that can be screened in accordance with the invention include, but are not limited to, peptides, antibodies and fragments thereof, prostaglandins, lipids and other organic compounds (e.g., terpines, peptidomimetics) that bind to the peptide or protein of interest of the current invention and either mimic the activity triggered by the natural ligand (i.e., agonists) or inhibit the activity triggered by the natural ligand (i.e., antagonists); as well as peptides, antibodies or fragments thereof, and other organic compounds that mimic the peptide or protein of interest of the current invention (or a portion thereof) and bind to and “neutralize” natural ligand.

[0129] Such compounds may include, but are not limited to, peptides such as, for example, soluble peptides, including but not limited to members of random peptide libraries (see, e.g., Lam, K. S. et al., 1991, Nature 354:82-84; Houghten, R. et al., 1991, Nature 354:84-86), and combinatorial chemistry-derived molecular library peptides made of D- and/or L- configuration amino acids, phosphopeptides (including, but not limited to members of random or partially degenerate, directed phosphopeptide libraries; see, e.g., Songyang, Z. et al., 1993, Cell 72:767-778); antibodies (including, but not limited to, polyclonal, monoclonal, humanized, anti-idiotypic, chimeric or single chain antibodies, and Fab, F(ab′)₂ and Fab expression library fragments, and epitope-binding fragments thereof); and small organic or inorganic molecules.

[0130] Other compounds that can be screened in accordance with the invention include, but are not limited to, small organic molecules that are able to gain entry into an appropriate cell (e.g., in ES cells) and affect the expression of a gene of the current invention or some other gene involved in development and cell differentiation (e.g., by interacting with the regulatory region or transcription factors involved in gene expression); or such compounds that affect the activity of the peptide or protein of interest of the current invention, e.g., by inhibiting or enhancing the binding of such peptide or protein to another cellular peptide or protein, or other factor, necessary for catalysis, signal transduction, or the like, that is involved in developmental or cell differentiation processes.

[0131] Computer modeling and searching technologies permit the identification of compounds, or the improvement of already identified compounds, that can modulate the expression or activity of peptides or proteins of interest of the current invention. Having identified such a compound or composition, the active sites or regions are identified. Such active sites might typically be the binding partner sites, such as, for example, the interaction domains of the peptides and proteins of the current invention with their respective binding partners. The active site can be identified using methods known in the art including, for example, from study of the amino acid sequences of peptides, from the nucleotide sequences of nucleic acids, or from study of complexes of the relevant compound or composition with its natural ligand. In the latter case, chemical or X-ray crystallographic methods can be used to find the active site by finding where on the factor the complexed ligand is found.

[0132] Next, the three dimensional geometric structure of the active site is determined. This can be done by known methods, including X-ray crystallography, which can determine a complete molecular structure. On the other hand, solid or liquid phase NMR can be used to determine certain intramolecular distances. Any other experimental method of structure determination can be used to obtain partial or complete geometric structures. The geometric structures may be measured with a complexed ligand, natural or artificial, which may increase the accuracy of the active site structure determined.

[0133] If an incomplete or insufficiently accurate structure is determined, the methods of computer based numerical modeling can be used to complete the structure or improve its accuracy. Any recognized modeling method may be used, including parameterized models specific to particular biopolymers such as proteins or nucleic acids, molecular dynamics models based on computing molecular motions, statistical mechanics models based on thermal ensembles, or combined models. For most types of models, standard molecular force fields, representing the forces between constituent atoms and groups, are necessary, and can be selected from force fields known in physical chemistry. The incomplete or less accurate experimental structures can serve as constraints on the complete and more accurate structures computed by these modeling methods.

[0134] Finally, having determined the structure of the active site, either experimentally, by modeling, or by a combination, candidate modulating compounds can be identified by searching databases containing compounds along with information on their molecular structure. Such a search seeks compounds having structures that match the determined active site structure and that interact with the groups defining the active site. Such a search can be manual, but is preferably computer assisted. These compounds found from this search are potential modulating compounds of the peptides and proteins of interest of the current invention.

[0135] Alternatively, these methods can be used to identify improved modulating compounds from an already known modulating compound or ligand. The composition of the known compound can be modified and the structural effects of modification can be determined using the experimental and computer modeling methods described above applied to the new composition. The altered structure is then compared to the active site structure of the compound to determine if an improved fit or interaction results. In this manner systematic variations in composition, such as by varying side groups, can be quickly evaluated to obtain modified modulating compounds or ligands of improved specificity or activity.

[0136] Further experimental and computer modeling methods useful to identify modulating compounds based upon identification of the active sites of peptides and proteins of interest of the current invention, and related factors involved in development, cellular differentiation, and other cellular processes will be apparent to those of skill in the art.

[0137] Examples of molecular modeling systems are the CHARM and QUANTA programs (Polygon Corporation, Waltham, Mass.). CHARM performs the energy minimization and molecular dynamics functions. QUANTA performs the construction, graphic modeling and analysis of molecular structure. QUANTA allows interactive construction, modification, visualization, and analysis of the behavior of molecules with each other.

[0138] A number of articles review computer modeling of drugs interactive with specific proteins, such as Rotivinen et al., 1988, Acta Pharmaceutical Fennica 97:159-166; Ripka, New Scientist 54-57 (Jun. 16, 1988); McKinaly and Rossmann, 1989, Annu. Rev. Pharmacol. Toxicol. 29:111-122; Perry and Davies, OSAR: Quantitative Structure-Activity Relationships in Drug Design pp. 189-193 (Alan R. Liss, Inc. 1989); Lewis and Dean, 1989, Proc. R. Soc. Lond. 236:125-140 and 141-162; and, with. respect to a model receptor for nucleic acid components, Askew et al., 1989, J. Am. Chem. Soc. 111:1082-1090. Other, computer programs that screen and graphically depict chemicals are available from companies such as BioDesign, Inc. (Pasadena, Cailf.), Allelix, Inc. (Mississauga, Ontario, Canada), and Hypercube, Inc. (Cambridge, Ontario). Although these are primarily designed for application to drugs specific to particular proteins, they can be adapted to the design of drugs specific to regions of DNA or RNA, once that region is identified.

[0139] Although described above with reference to the design and generation of compounds which could alter binding, one could also screen libraries of known compounds, including natural products or synthetic chemicals, and biologically active materials, including proteins, for compounds which are inhibitors or activators.

[0140] Compounds identified via assays such as those described herein may be useful, for example, in elaborating the biological function of the gene products of interest of the current invention, and for ameliorating disorders affecting development and cell differentiation. Assays for testing the effectiveness of compounds, identified by, for example, techniques such as those described below.

### 5.6.1. IN VITRO SCREENING ASSAYS FOR COMPOUNDS THAT BIND TO PEPTIDES AND PROTEINS OF THE CURRENT INVENTION

[0141] In vitro systems may be designed to identify compounds capable of interacting with (e.g., binding to) peptides and proteins of interest of the current invention, fragments thereof, and variants thereof. The identified compounds can be useful, for example, in modulating the activity of wild type and/or mutant gene products of the current invention; may be utilized in screens for identifying compounds that disrupt normal interactions of the peptides and proteins of the current invention with other factors, like, for example, other peptides and proteins; or may in themselves disrupt such interactions.

[0142] The principle of the assays used to identify compounds that bind to the peptides and proteins of the current invention involves preparing a reaction mixture of the peptides and proteins of interest that are disclosed by the current invention and a test compound under conditions and for a time sufficient to allow the two components to interact and bind, thus forming a complex that can be removed from and/or detected in the reaction mixture. The peptides and proteins of the current invention that are used can vary depending upon the goal of the screening assay. For example, where agonists of the natural ligand are sought, the full length peptide or protein of interest, or a fusion protein containing the subunit of interest fused to a protein or polypeptide that affords advantages in the assay system (e.g., labeling, isolation of the resulting complex, etc.) can be utilized.

[0143] The screening assays can be conducted in a variety of ways. For example, one method of conducting such an assay involves anchoring the peptide or protein of interest of the current invention, or a fusion protein thereof, or the test substance onto a solid phase and detecting peptide or protein of interest/test compound complexes anchored on the solid phase at the end of the reaction. In one embodiment of such a method, the peptide or protein of interest may be anchored onto a solid surface, and the test compound, which is not anchored, may be labeled, either directly or indirectly. In another embodiment of the method, a peptide or protein of interest of the current invention anchored on the solid phase is complexed with a natural ligand of such peptide or protein of interest. Then, a test compound could be assayed for its ability to disrupt the association of the complex.

[0144] In practice, microtiter plates may conveniently be utilized as the solid phase. The anchored component may be immobilized by non-covalent or covalent attachments. Non-covalent attachment may be accomplished by simply coating the solid surface with a solution of the protein and drying. Alternatively, an immobilized antibody, preferably a monoclonal antibody, specific for the peptide or protein to be immobilized may be used to anchor the peptide or protein to the solid surface. The surfaces may be prepared in advance and stored.

[0145] In order to conduct the assay, the nonimmobilized component is added to the coated surface containing the anchored component. After the reaction is complete, unreacted components are removed (e.g., by washing) under conditions such that any complexes formed will remain immobilized on the solid surface. The detection of complexes anchored on the solid surface can be accomplished in a number of ways. Where the previously nonimmobilized component is pre-labeled, the detection of label immobilized on the surface indicates that complexes were formed. Where the previously nonimmobilized component is not pre-labeled, an indirect label can be used to detect complexes anchored on the surface; e.g., using a labeled antibody specific for the previously nonimmobilized component (the antibody, in turn, may be directly labeled or indirectly labeled with a labeled anti-Ig antibody).

[0146] Alternatively, a reaction can be conducted in a liquid phase, the reaction products separated from unreacted components, and complexes detected; e.g., using an immobilized antibody specific for one component of complexes formed, like, for example, the peptide or protein of interest of the current invention or the test compound to anchor any complexes formed in solution, and a labeled antibody specific for the other component of the possible complex to detect anchored complexes.

### 5.6.2. ASSAYS FOR INTRACELLULAR PROTEINS THAT INTERACT WITH THE PEPTIDES AND PROTEINS OF THE CURRENT INVENTION

[0147] Any method suitable for detecting protein-protein interactions can be employed for identifying intracellular peptides and proteins that interact with peptides and proteins of the current invention. Among the traditional methods which may be employed are co-immunoprecipitation, crosslinking and co-purification through gradients or chromatographic columns of cell lysates or proteins obtained from cell lysates and the peptides and proteins of the current invention to identify proteins in the lysate that interact with those peptides and proteins of the current invention. For these assays, the peptides and proteins of the current invention may be used in full length, or in truncated or modified forms or as fusion-proteins. Similarly, the component may be a complex of two or more of the peptides and proteins of the current invention. Once isolated, such an intracellular protein can be identified and can, in turn, be used, in conjunction with standard techniques, to identify proteins with which it interacts. For example, at least a portion of the amino acid sequence of an intracellular protein which interacts with a peptide or protein of the current invention, can be ascertained using techniques well known to those of skill in the art, such as via the Edman degradation technique. (See, e.g., Creighton, 1983, “Proteins: Structures and Molecular Principles”, W. H. Freeman &.Co., N.Y., pp.34-49). The amino acid sequence obtained may be used as a guide for the generation of oligonucleotide mixtures that can be used to screen for gene sequences encoding such intracellular proteins. Screening may be accomplished, for example, by standard hybridization or PCR techniques. Techniques for the generation of oligonucleotide mixtures and the screening are well-known. (See, e.g., Ausubel, supra., and PCR Protocols: A Guide to Methods and Applications, 1990, Innis, M. et al., eds. Academic Press, Inc., New York).

[0148] Additionally, methods may be employed which result in the simultaneous identification of genes which encode the intracellular proteins interacting with peptides and proteins of the current invention. These methods include, for example, probing expression libraries, in a manner similar to the well known technique of antibody probing of ëgt11 libraries, using a labeled form of a peptide or protein of the current invention, or a fusion protein, e.g., a peptide or protein at least partially encoded by an GTS of the current invention fused to a marker (e.g., an enzyme, fluor, luminescent protein, or dye), or an Ig-Fc domain.

[0149] One method that detects protein interactions in vivo, the two-hybrid system, is described in detail for illustration only and not by way of limitation. One version of this system has been described (Chien et al., 1991, Proc. Natl. Acad. Sci. USA, 88:9578-9582) and is commercially available from Clontech (Palo Alto, Cailf.).

[0150] Briefly, utilizing such a system, plasmids are constructed that encode two hybrid proteins: one plasmid consists of nucleotides encoding the DNA-binding domain of a transcription activator protein fused to a nucleotide sequence of the current invention encoding a peptide or protein of the current invention, a modified or truncated form or a fusion protein, and the other plasmid consists of nucleotides encoding the transcription activator protein's activation domain fused to a cDNA encoding an unknown protein which has been recombined into this plasmid as part of a cDNA library. The DNA-binding domain fusion plasmid and the cDNA library are transformed into a strain of the yeast Saccharomyces cerevisiae that contains a reporter gene (e.g., HBS or lacZ) whose regulatory region contains the transcription activator's binding site. Either hybrid protein alone cannot activate transcription of the reporter gene; the DNA-binding domain hybrid cannot because it does not provide activation function, and the activation domain hybrid cannot because it cannot localize to the activator's binding sites. Interaction of the two hybrid proteins reconstitutes the functional activator protein and results in expression of the reporter gene, which is detected by an assay for the reporter gene product.

[0151] The two-hybrid system or related methodology may be used to screen activation domain libraries for proteins that interact with the “bait” gene product. By way of example, and not by way of limitation, a peptide or protein of the current invention may be used as the bait gene product. Total genomic or cDNA sequences are fused to the DNA encoding an activation domain. This library and a plasmid encoding a hybrid of a bait gene product of the current invention fused to the DNA-binding domain are cotransformed into a yeast reporter strain, and the resulting transformants are screened for those that express the reporter gene. For example, and not by way of limitation, a bait gene sequence of the current invention can be cloned into a vector such that it is translationally fused to the DNA encoding the DNA-binding domain of the GAL4 protein. These colonies are purified and the library plasmids responsible for reporter gene expression are isolated. DNA sequencing is then used to identify the proteins encoded by the library plasmids.

[0152] A cDNA library of the cell line from which proteins that interact with bait gene product of the current invention are to be detected can be made using methods routinely practiced in the art. According to the particular system described herein, for example, the cDNA fragments can be inserted into a vector such that they are translationally fused to the transcriptional activation domain of GAL4. This library can be co-transfected along with the bait gene-GAL4 fusion plasmid into a yeast strain which contains a lacZ gene driven by a promoter which contains GAL4 activation sequence. A cDNA encoded protein, fused to GAL4 transcriptional activation domain, that interacts with bait gene product will reconstitute an active GAL4 protein and thereby drive expression of the HIS3 gene. Colonies which express HIS3 can be detected by their growth on petri dishes containing semi-solid agar based media lacking histidine. The cDNA can then be purified from these strains, and used to produce and isolate the bait gene-interacting protein using techniques routinely practiced in the art.

### 5.6.3. ASSAYS FOR COMPOUNDS THAT INTERFERE WITH INTERACTIONS OF THE PEPTIDES AND PROTEINS OF THE CURRENT INVENTION WITH INTRACELLULAR MACROMOLECULES

[0153] The macromolecules that interact with the peptides and proteins of the current invention are referred to, for purposes of this discussion, as “binding partners”. These binding partners are likely to be involved in catalytic reactions or signal transduction pathways, and therefore, in the role of the peptides and proteins of the current invention in development and cell differentiation. It is also desirable to identify compounds that interfere with or disrupt the interaction of such binding partners with the peptides and proteins of the current invention which may be useful in regulating the activity of the peptides and proteins of the current invention and thus control development and cell differentiation disorders associated with the activity of the peptides and proteins of the current invention.

[0154] The basic principle of the assay systems used to identify compounds that interfere with the interaction between the peptides and proteins of the current invention and its binding partner or partners involves preparing a reaction mixture containing the peptides or proteins of the current invention of interest, modified or truncated version thereof, or fusion proteins thereof as described above, and the binding partner under conditions and for a time sufficient to allow the two to interact and bind, thus forming a complex. In order to test a compound for inhibitory activity, the reaction mixture is prepared in the presence and absence of the test compound. The test compound may be initially included in the reaction mixture, or may be added at a time subsequent to the addition of the peptide or protein of the current invention and its binding partner. Control reaction mixtures are incubated without the test compound or with a placebo. The formation of any complexes between the peptide or protein of the current invention and the binding partner is then detected. The formation of a complex in the control reaction, but not in the reaction mixture containing the test compound, indicates that the compound interferes with the interaction of the peptide or protein at least partially encoded by an GTS of the present invention and the interactive binding partner. Additionally, complex formation within reaction mixtures containing the test compound and normal peptide or protein of the current invention may also be compared to complex formation within reaction mixtures containing the test compound and a mutant peptide or protein of the current invention. This comparison may be important in those cases where it is desirable to identify compounds that disrupt interactions of mutant but not normal forms of a peptide or protein of the current invention.

[0155] The assay for compounds that interfere with the interaction of a peptide or protein of the current invention and binding partners can be conducted in a heterogeneous or homogeneous format. Heterogeneous assays involve anchoring either the peptide or protein of the current invention or the binding partner onto a solid phase and detecting complexes anchored on the solid phase at the end of the reaction. In homogeneous assays, the entire reaction is carried out in a liquid phase. In either approach, the order of addition of reactants can be varied to obtain different information about the compounds being tested. For example, test compounds that interfere with the interaction by competition can be identified by conducting the reaction in the presence of the test substance; i.e., by adding the test substance to the reaction mixture prior to or simultaneously with the peptide or protein of the current invention and interactive binding partner. Alternatively, test compounds that disrupt preformed complexes, e.g. compounds with higher binding constants that displace one of the components from the complex, can be tested by adding the test compound to the reaction mixture after complexes have been formed. The various formats are described briefly below.

[0156] In a heterogeneous assay system, either the peptide or protein of the current invention or the interactive binding partner, is anchored onto a solid surface, while the non-anchored species is labeled, either directly or indirectly. In practice, microtiter plates are conveniently utilized. The anchored species may be immobilized by non-covalent or covalent attachments. Non-covalent attachment may be accomplished simply by coating the solid surface with a solution of the peptide or protein of the current invention or binding. partner and drying. Alternatively, an immobilized antibody specific for the species to be anchored may be used to anchor the species to the solid surface. The surfaces may be prepared in advance and stored.

[0157] In order to conduct the assay, the partner of the immobilized species is exposed to the coated surface with or without the test compound. After the reaction is complete, unreacted components are removed (e.g., by washing) and any complexes formed will remain immobilized on the solid surface. The detection of complexes anchored on the solid surface can be accomplished in a number of ways. Where the non-immobilized species is pre-labeled, the detection of label immobilized on the surface indicates that complexes were formed. Where the non-immobilized species is not pre-labeled, an indirect label can be used to detect complexes anchored on the surface; e.g., using a labeled antibody specific for the initially non-immobilized species (the antibody, in turn, may be directly labeled or indirectly labeled with a labeled anti-Ig antibody). Depending upon the order of addition of reaction components, test compounds which inhibit complex formation or which disrupt preformed complexes can be detected.

[0158] Alternatively, the reaction can be conducted in a liquid phase in the presence or absence of the test compound, the reaction products separated, from unreacted components, and complexes detected; e.g., using an immobilized antibody specific for one of the binding components to anchor any complexes formed in solution, and a labeled antibody specific for the other partner to detect anchored complexes. Again, depending upon the order of addition of reactants to the liquid phase, test compounds which inhibit complex or which disrupt preformed complexes can be identified.

[0159] In an alternate embodiment of the invention, a homogeneous assay can be used. In this approach, a preformed complex of the peptide or protein of the current invention and the interactive binding partner is prepared in which either the peptide or protein of the current invention or its binding partner is labeled, but the signal generated by the label is quenched due to formation of the complex (see, e.g., U.S. Pat. No. 4,109,496 by Rubenstein which utilizes this approach for immunoassays). The addition of a test substance that competes with and displaces one of the species from the preformed complex will result in the generation of a signal above background. In this way, test substances which disrupt peptide or protein of the current invention/intracellular binding partner interaction can be identified.

[0160] In a particular embodiment, a peptide or protein of the current invention can be prepared for immobilization. For example, the peptide or protein of the current invention or a fragment thereof can be fused to a glutathione-S-transferase (GST) gene using a fusion vector, such as pGEX-5X-1, in such a manner that its binding activity is maintained in the resulting fusion protein. The interactive binding partner can be purified and used to raise a monoclonal antibody, using methods routinely practiced in the art and described above. This antibody can be labeled with the radioactive isotope ¹²⁵I, for example, by methods routinely practiced in the art. In a heterogeneous assay, e.g., the GST-peptide or protein of the current invention fusion protein can be anchored to glutathione-agarose beads. The interactive binding partner can then be added in the presence or absence of the test compound in a manner that allows interaction and binding to occur. At the end of the reaction period, unbound material can be washed away, and the labeled monoclonal antibody can be added to the system and allowed to bind to the complexed components. The interaction between the peptide or protein of the current invention and the interactive binding partner can be detected by measuring the amount of radioactivity that remains associated with the glutathione-agarose beads. A successful inhibition of the interaction by the test compound will result in a decrease in measured radioactivity.

[0161] Alternatively, the GST-peptide or protein of the current invention fusion protein and the interactive binding partner can be mixed together in liquid in the absence of the solid glutathione-agarose beads. The test compound can be added either during or after the species are allowed to interact. This mixture can then be added to the glutathione-agarose beads and unbound material is washed away. Again the extent of inhibition of the peptide or protein of the current invention/binding partner interaction can be detected by adding the labeled antibody and measuring the radioactivity associated with the beads.

[0162] In another embodiment of the invention, these same techniques can be employed using peptide fragments that correspond to the binding domains of a peptide or protein of the current invention and/or the interactive or binding partner (in cases where the binding partner is a protein), in place of one or both of the full length proteins. Any number of methods routinely practiced in the art can be used to identify and isolate the binding sites. These methods include, but are not limited to, mutagenesis of the gene encoding one of the proteins and screening for disruption of binding in a co-immunoprecipitation assay. Compensating mutations in the gene encoding the second species in the complex can then be selected. Sequence analysis of the genes encoding the respective proteins will reveal the mutations that correspond to the region of the protein involved in interactive binding. Alternatively, one protein can be anchored to a solid surface using methods described above, and allowed to interact with and bind to its labeled binding partner, which has been treated with a proteolytic enzyme, such as trypsin. After washing, a short, labeled peptide comprising the binding domain may remain associated with the solid material, which can be isolated and identified by amino acid sequencing. Also, once the gene coding for the intracellular binding partner is obtained, short gene segments can be engineered to express peptide fragments of the protein, which can then be tested for binding activity and purified or synthesized.

[0163] For example, and not by way of limitation, a peptide or protein of the current invention can be anchored to a solid material as described, above, by making a GST-peptide or protein of the current invention fusion protein and allowing it to bind to glutathione agarose beads. The interactive binding partner can be labeled with a radioactive isotope, such as ³⁵S, and cleaved with a proteolytic enzyme such as trypsin. Cleavage products can then be added to the anchored GST-peptide or protein of the current invention fusion protein and allowed to bind. After washing away unbound peptides, labeled bound material, representing the intracellular binding partner binding domain, can be eluted, purified, and analyzed for amino acid sequence by well-known methods. Peptides so identified can be produced synthetically or fused to appropriate facilitative proteins using recombinant DNA technology.

### 5.6.4. ASSAYS FOR IDENTIFICATION OF COMPOUNDS THAT AMELIORATE DISORDERS AFFECTING DEVELOPMENT AND CELL DIFFERENTIATION

[0164] Compounds, including but not limited to binding compounds identified via assay techniques such as those described above, can be tested for the ability to ameliorate development and cell differentiation disorder symptoms. The assays described above can identify compounds which affect the activity of peptides and proteins of the current invention (e.g., compounds that bind to the peptides and proteins of the current invention, inhibit binding of their natural ligands, and compounds that bind to a natural ligand of the peptides and proteins of the current invention and neutralize the ligand activity); or compounds that affect the activity of genes encoding peptides and proteins of the current invention (by affecting the expression of those genes, including molecules, e.g., proteins or small organic molecules, that affect or interfere with splicing events so that expression of the genes of interest can be modulated). However, it should be noted that the assays described herein can also identify compounds that modulate signal transduction or catalytic events that the peptides and proteins of the current invention are involved in. The identification and use of such compounds which affect a step in, for example, signal transduction pathways or catalytic events in which any of the peptides and proteins of the current invention are involved in, may modulate the effect of the peptides and proteins of the current invention on developmental or cell differentiation disorders. Such identification and use of such compounds are within the scope of the invention. Such compounds can be used as part of a therapeutic method for the treatment of developmental and cell differentiation disorders.

[0165] The invention encompasses cell-based and animal model-based assays for the identification of compounds exhibiting such an ability to ameliorate developmental and cell differentiation disorder symptoms. Such cell-based assay systems can also be used as the standard to assay for purity and potency of the natural ligand, catalytic subunit, including recombinantly or synthetically produced catalytic subunit and catalytic subunit mutants.

[0166] Cell-based systems can be used to identify compounds which may act to ameliorate developmental or cell differentiation disorder symptoms. Such cell systems can include, for example, recombinant or non-recombinant cells, such as cell lines, which express the gene encoding the peptide or protein of interest of the current invention. For example ES cells, or cell lines derived from ES cells can be used. In addition, expression host cells (e.g., COS cells, CHO cells, fibroblasts, Sf9 cells) genetically engineered to express a functional peptide or protein of the current invention in addition to factors necessary for the peptide or protein of the current invention to fulfil its physiological role of, for example, signal transduction or catalysis, can be used as an end point in the assay.

[0167] In utilizing such cell systems, cells may be exposed to a compound suspected of exhibiting an ability to ameliorate developmental or cell differentiation disorder symptoms, at a sufficient concentration and for a time sufficient to elicit such an amelioration of such disorder symptoms in the exposed cells. After exposure, the cells can be assayed to measure alterations in the expression of the gene encoding the peptide or protein of interest of the current invention, e.g., by assaying cell lysates for the appropriate mRNA transcripts (e.g., by Northern analysis) or for expression of the peptide or protein of interest of the current invention in the cell; compounds which regulate or modulate expression of the gene encoding the peptide or protein of interest of the current invention are valuable candidates as therapeutics. Alternatively, the cells are examined to determine whether one or more developmental or cell differentiation disorder-like cellular phenotypes has been altered to resemble a more normal or more wild type phenotype, or a phenotype more likely to produce a lower incidence or severity of disorder symptoms. Still further, the expression and/or activity of components of pathways or functionally or physiologically connected peptides or proteins of which the peptide or protein of interest of the current invention is a part, can be assayed.

[0168] For example, after exposure of the cells, cell lysates can be assayed for the presence of increased levels of the test compound as compared to lysates derived from unexposed control cells. The ability of a test compound to inhibit production of the assay compound such systems indicates that the test compound inhibits signal transduction initiated by the peptide or protein of interest of the current invention. Finally, a change in cellular morphology of intact cells may be assayed using techniques well known to those of skill in the art.

[0169] In addition, animal-based development or cell differentiation disorder systems, which may include, for example, mice, may be used to identify compounds capable of ameliorating development or cell differentiation disorder-like symptoms. Such animal models may be used as test systems for the identification of drugs, pharmaceuticals, therapies and interventions which may be effective in treating such disorders. For example, animal models may be exposed to a compound, suspected of exhibiting an ability to ameliorate development or cell differentiation disorder symptoms, at a sufficient concentration and for a time sufficient to elicit such an amelioration of development and/or cell differentiation disorder symptoms in the exposed animals. The response of the animals to the exposure may be monitored by assessing the reversal of disorders associated with development and/or cell differentiation disorders. With regard to intervention, any treatments which reverse any aspect of development or cell differentiation disorder-like symptoms should be considered as candidates for human development and/or cell differentiation disorder therapeutic intervention. Dosages of test agents may be determined by deriving dose-response curves, as discussed below.

### 5.7. THE TREATMENT OF DISORDERS ASSOCIATED WITH STIMULATION OF PEPTIDES AND PROTEINS OF THE CURRENT INVENTION

[0170] The invention also encompasses methods and compositions for modifying development and cell differentiation and treating development and cell differentiation disorders. For example, one may decrease the level of expression of one or more genes of the current invention, and/or downregulate activity of one or more of the peptides or proteins of interest of the current invention. Thereby, the response of cells, like, for example, ES cells, to factors which activate the physiological responses that enhance the pathological processes leading to developmental and cell differentiation disorders may be reduced and the symptoms ameliorated. Conversely, the response of cells, like, for example, ES cells, to physiological stimuli involving any of the peptides or proteins of the current invention and necessary for proper developmental and cell differentiation processes may be augmented by increasing the activity of one or several of the peptides or proteins of interest of the current invention. Different approaches are discussed below.

### 5.7.1. INHIBITION OF PEPTIDES AND PROTEINS OF THE CURRENT INVENTION TO REDUCE DEVELOPMENT AND CELL DIFFERENTIATION DISORDERS

[0171] Any method which neutralizes the catalytic or signal transduction activity of peptides and proteins at least partially encoded by the GTSs of the current invention, or which inhibits expression of the genes encoding peptides and proteins (either transcription or translation), can be used to reduce symptoms associated with developmental and cell differentiation disorders.

[0172] In one embodiment, immuno therapy can be designed to reduce the level of endogenous gene expression for the peptides and proteins of the current invention, e.g., using antisense or ribozyme approaches to inhibit or prevent translation of mRNA transcripts; triple helix approaches to inhibit transcription of the genes; or targeted homologous recombination to inactivate or “knock out” the genes or its endogenous promoter.

[0173] Antisense approaches involve the design of oligonucleotides (either DNA or RNA) that are complementary to mRNA specific for peptides and proteins of interest of the current invention. The antisense oligonucleotides will bind to the complementary mRNA transcripts and prevent translation. Absolute complementarity, although preferred, is not required. A sequence “complementary” to a portion of an RNA, as referred to herein, means a sequence having sufficient complementarity to be able to hybridize with the RNA, forming a stable duplex. In the case of double-stranded antisense nucleic acids, a single strand of the normally duplex DNA can thus be tested, or triplex formation can be assayed. The ability to hybridize will depend on both the degree of complementarity and the length of the antisense nucleic acid. Generally, the longer the hybridizing nucleic acid, the more base mismatches with an RNA it may contain and still form a stable duplex (or triplex, as the case may be). One skilled in the art can ascertain a tolerable degree of mismatch by use of standard procedures to determine the melting point of the hybridized complex.

[0174] Oligonucleotides that are complementary to the 5′ end of the message, e.g., the 5′ untranslated sequence up to and including the AUG initiation codon, should work most efficiently at inhibiting translation. However, sequences complementary to the 3′. untranslated sequences of mRNAs have recently shown to be effective at inhibiting translation of mRNAs as well. See generally, Wagner, R., 1994, Nature 372:333-335. Thus, oligonucleotides complementary to either the 5′- or 3′- non- translated, non-coding regions of the mRNAs specific for the peptides and proteins of the current invention could be used in an antisense approach to inhibit translation of those endogenous mRNAs. Oligonucleotides complementary to the 5′ untranslated region of the mRNA should include the complement of the AUG start codon. Antisense oligonucleotides complementary to mRNA coding regions are less efficient inhibitors of translation but could be used in accordance with the invention. Whether designed to hybridize to the 5′-, 3′-or coding region of an mRNA, antisense nucleic acids should be at least six nucleotides in length, and are preferably oligonucleotides ranging from 6 to about 50 nucleotides in length. In specific aspects the oligonucleotide is at least 10 nucleotides, at least 17 nucleotides, at least 25 nucleotides or at least 50 nucleotides.

[0175] Regardless of the choice of target sequence, it is preferred that in vitro studies are first performed to quantitate the ability of the antisense oligonucleotide to inhibit gene expression. It is preferred that these studies utilize controls that distinguish between antisense gene inhibition and nonspecific biological effects of oligonucleotides. It is also preferred that these studies compare levels of the target RNA or protein with that of an internal control RNA or protein. Additionally, it is envisioned that results obtained using the antisense oligonucleotide are compared with those obtained using a control oligonucleotide. It is preferred that the control oligonucleotide is of approximately the same length as the test oligonucleotide and that the nucleotide sequence of the oligonucleotide differs from the antisense sequence no more than is necessary to prevent specific hybridization to the target sequence.

[0176] The oligonucleotides can be DNA or RNA or chimeric mixtures or derivatives or modified versions thereof, single-stranded or double-stranded. The oligonucleotide can be modified at the base moiety, sugar moiety, or phosphate backbone, for example, to improve stability of the molecule, hybridization, etc. The oligonucleotide may include other appended groups such as peptides (e.g., for targeting host cell receptors in vivo), or agents facilitating transport across the cell membrane (see, e.g., Letsinger et al., 1989, Proc. Natl. Acad. Sci. U.S.A. 86:6553-6556; Lemaitre et al., 1987, Proc. Natl. Acad. 84:648-652; PCT Publication No. WO88/09810, published Dec. 15, 1988), or hybridization-triggered cleavage agents. (See, e.g., Krol et al., 1988, BioTechniques 6:958-976) or intercalating agents. (See, e.g., Zon, 1988, Pharm. Res. 5:539-549). To this end, the oligonucleotide may be conjugated to another molecule, e.g., a peptide, hybridization triggered cross-linking agent, transport agent, hybridization-triggered cleavage agent, etc.

[0177] The antisense oligonucleotide may comprise at least one modified base moiety which is selected from the group including but not limited to 5-fluorouracil, 5-bromouracil, 5-chlorouracil, 5-iodouracil, hypoxanthine, xantine, 4-acetylcytosine, 5-(carboxyhydroxylmethyl) uracil, 5-carboxymethylaminomethyl-2-thiouridine, 5-carboxymethylaminomethyluracil, dihydrouracil, beta-D-galactosylqueosine, inosine, N6-isopentenyladenine, 1-methylguanine, 1-methylinosine, 2,2-dimethylguanine, 2-methyladenine, 2-methylguanine, 3-methylcytosine, 5-methylcytosine, N6-adenine, 7-methylguanine, 5-methylaminomethyluracil, 5-methoxyaminomethyl-2-thiouracil, beta-D-mannosylqueosine, 5′-methoxycarboxymethyluracil, 5-methoxyuracil, 2-methylthio-N6-isopentenyladenine, uracil-5-oxyacetic acid (v), wybutoxosine, pseudouracil, queosine, 2-thiocytosine, 5-methyl-2-thiouracil, 2-thiouracil, 4-thiouracil, 5-methyluracil, uracil-5-oxyacetic acid methylester, uracil-5-oxyacetic acid (v), 5-methyl-2-thiouracil, 3-(3-amino-3-N-2-carboxypropyl) uracil, (acp3)w, and 2,6-diaminopurine.

[0178] The antisense oligonucleotide may also comprise at least one modified sugar moiety selected from the group including but not limited to arabinose, 2-fluoroarabinose, xylulose, and hexose.

[0179] In another embodiment, the antisense oligonucleotide comprises at least one modified phosphate backbone selected from the group consisting of a phosphorothioate, a phosphorodithioate, a phosphoramidothioate, a phosphoramidate, a phosphordiamidate, a methylphosphonate, an alkyl phosphotriester, and a formacetal or analog thereof.

[0180] In yet another embodiment, the antisense oligonucleotide is an alpha-anomeric oligonucleotide. An alpha-anomeric oligonucleotide forms specific double-stranded hybrids with complementary RNA in which, contrary to the usual alpha-units, the strands run parallel to each other (Gautier et al., 1987, Nucl. Acids Res. 15:6625-6641). The oligonucleotide is a 2′-0-methylribonucleotide (Inoue et al., 1987, Nucl. Acids Res. 15:6131-6148), or a chimeric RNA-DNA analogue.(Inoue et al., 1987, FEBS Lett. 215:327-330).

[0181] Oligonucleotides of the invention may be synthesized by standard methods known in the art, e.g. by use of an automated DNA synthesizer (such as are commercially available from Biosearch, Applied Biosystems, etc.). As examples, phosphorothioate oligonucleotides may be synthesized by the method of Stein et al., 1988, Nucl. Acids Res. 16:3209. Methylphosphonate oligonucleotides can be prepared by use of controlled pore glass polymer supports (Sarin et al., 1988, Proc. Natl. Acad. Sci. U.S.A. 85:7448-7451).

[0182] While antisense nucleotides complementary to the coding region sequence specific for the peptides and proteins of the current invention could be used, those complementary to the transcribed untranslated region are most preferred.

[0183] The antisense molecules should be delivered to cells which express the peptides and proteins of interest of the current invention in vivo, like, for example, ES cells. A number of methods have been developed for delivering antisense DNA or RNA to cells; e.g., antisense molecules can be injected directly into the tissue or cell derivation site, or modified antisense molecules, designed to target the desired cells (e.g., antisense linked to peptides or antibodies that specifically bind receptors or antigens expressed on the target cell surface) can be administered systemically.

[0184] However, it is often difficult to achieve intracellular concentrations of antisense molecules that are sufficient to suppress translation of endogenous mRNAs. Therefore a preferred approach utilizes a recombinant DNA construct in which the antisense oligonucleotide is placed under the control of a strong pol III or pol II promoter. The use of such a construct to transfect target cells in the patient will result in the transcription of sufficient amounts of single stranded RNAs that will form complementary base pairs with the endogenous transcripts specific for the peptides and proteins of interest of the current invention and thereby prevent. translation of the respective mRNAs. For example, a vector can be introduced in vivo such that it is taken up by a cell and directs the transcription of an antisense RNA. Such a vector can remain episomal or become chromosomally integrated, as long as it can be transcribed to produce the desired antisense RNA. Such vectors can be constructed by recombinant DNA technology methods standard in the art. Vectors can be plasmid, viral, or others known in the art, used for replication and expression in mammalian cells. Expression of the sequence encoding the antisense RNA can be by any promoter known in the art to act in mammalian, preferably human cells. Such promoters can be inducible or constitutive. Such promoters include but are not limited to: the SV40 early promoter region (Bernoist and Chambon, 1981, Nature 290:304-310), the promoter contained in the 3′ long terminal repeat of Rous sarcoma virus (Yamamoto et al., 1980, Cell 22:787-797), the herpes thymidine kinase promoter (Wagner et al., 1981, Proc. Natl. Acad. Sci. U.S.A. 78:1441-1445), the regulatory sequences of the metallothionein gene (Brinster et al., 1982, Nature 296:39-42), etc. Any type of plasmid, cosmid, YAC or viral vector can be used to prepare the recombinant DNA construct which can be introduced directly into the tissue or cell derivation site; e.g., the bone marrow. Alternatively, viral vectors can be used which selectively infect the desired tissue or cell type; (e.g., viruses which infect cells of hematopoietic lineage), in which case administration may be accomplished by another route (e.g., systemically).

[0185] Ribozyme molecules designed to catalytically cleave mRNA transcripts specific for the peptides and proteins of interest of the current invention can also be used to prevent translation of the mRNAs of interest and expression of the peptides and proteins encoded by those mRNAs. (See, e.g., PCT International Publication WO90/11364, published Oct. 4, 1990; Sarver et al., 1990, Science 247:1222-1225). While ribozymes that cleave mRNA at site specific recognition sequences can be used to destroy mRNAs, the use of hammerhead ribozymes is preferred. Hammerhead ribozymes cleave mRNAs at locations dictated by flanking regions that form complementary base pairs with the target mRNA. The sole requirement is that the target mRNA have the following sequence of two bases: 5′-UG-3′. The construction and production of hammerhead ribozymes is well known in the art and is described more fully in Haseloff and Gerlach, 1988, Nature, 334:585-591. Preferably the ribozyme is engineered so that the cleavage recognition site is located near the 5′ end of the mRNA of interest; i.e., to increase efficiency and minimize the intracellular accumulation of non-functional mRNA transcripts.

[0186] The ribozymes of the present invention also include RNA endoribonucleases (hereinafter “Cech-type ribozymes”) such as the one which occurs naturally in Tetrahymena Thermophila (known as the IVS, or L-19 IVS RNA) and which has been extensively described by Thomas Cech and collaborators (Zaug et al., 1984, Science, 224:574-578; Zaug and Cech, 1986, Science, 231:470-475; Zaug et al., 1986, Nature, 324:429-433; published International Patent Application No. WO 88/04300 by University Patents Inc.; Been and Cech, 1986, Cell, 47:207-216). The Cech-type ribozymes have an eight base pair active site which hybridizes to a target RNA sequence where after cleavage of the target RNA takes place. The invention encompasses those Cech-type ribozymes which target eight base-pair active site sequences that are present in the mRNAs specific for the peptides and proteins of interest of the current invention.

[0187] As in the antisense approach, the ribozymes can be composed of modified oligonucleotides (e.g. for improved stability, targeting, etc.) and should be delivered to cells which express the peptides and proteins of interest of the current invention in vivo, like, for example, ES cells. A preferred method of delivery involves using a DNA construct “encoding” the ribozyme under the control of a strong constitutive pol III or pol II promoter, so that transfected cells will produce sufficient quantities of the ribozyme to destroy the endogenous messages specific for the peptides and proteins of interest of the current invention and inhibit translation. Because ribozymes unlike antisense molecules, are catalytic, a lower intracellular concentration is required for efficiency.

[0188] Endogenous gene expression can also be reduced by inactivating or “knocking out” the gene of interest specific for a peptide or protein of the current invention or its promoter using targeted homologous recombination. (e.g., see Smithies et al., 1985, Nature 317:230-234; Thomas & Capecchi, 1987, Cell 51:503-512; Thompson et al., 1989 Cell 5:313-321; each of which is incorporated by reference herein in its entirety). For example, a mutant, non-functional peptide or protein of interest of the current invention (or a completely unrelated DNA sequence) flanked by DNA homologous to the endogenous gene encoding said peptide or protein of interest of the current invention (either the coding regions or regulatory regions of the gene) can be used, with or without a selectable marker and/or a negative selectable marker, to transfect cells that express said peptide or protein of interest of the current invention in vivo. Insertion of the DNA construct, via targeted homologous recombination, results in inactivation of the targeted endogenous gene. Such approaches are particularly suited in the agricultural field where modifications to ES cells can be used to generate animal offspring with an inactive copy of a gene encoding a peptide or protein of interest of the current invention (e.g., see Thomas & Capecchi 1987 and Thompson 1989, supra). However this approach can be adapted for use in humans provided the recombinant DNA constructs are directly administered or targeted to the required site in vivo using appropriate viral vectors.

[0189] Alternatively, endogenous expression of a gene of interest can be reduced by targeting deoxyribonucleotide sequences complementary to the regulatory region of said gene (i.e., the promoter and/or enhancers) to form triple helical structures that prevent transcription of the gene of interest in target cells in the body. (See generally, Helene, C. 1991, Anticancer Drug Des., 6(6):569-84; Helene, C. et al., 1992, Ann, N.Y. Acad. Sci., 660:27-36; and Maher, L. J., 1992, Bioassays 14(12):807-15).

[0190] In yet another embodiment of the invention, the activity of a peptide or protein of interest of the current invention can be reduced using a “dominant negative” approach. A dominant negative approach takes advantage of the interaction of the peptides or proteins of interest with other peptides or proteins to form complexes, the formation of which is a prerequisite for the peptide or protein of interest of the current invention to exert its physiological activity. To this end, constructs which encode a defective form of the peptide or protein of interest of the current invention can be used in gene therapy approaches to diminish the activity of said peptide or protein of interest in appropriate target cells. Alternatively, targeted homologous recombination can be utilized to introduce such deletions or mutations into the subject's endogenous gene encoding the peptide or protein of interest of the current invention in the appropriate tissue. The engineered cells will express non-functional copies of the peptide or protein of interest of the current invention, thereby downregulating its activity in vivo. Such engineered cells should demonstrate a diminished response to physiological stimuli of the activity of the affected peptide or protein of interest of the current invention, resulting in reduction of the development or cell differentiation disorder phenotype.

### 5.7.2. RESTORATION OR INCREASE IN EXPRESSION OR ACTIVITY OF A PEPTIDE OR PROTEIN OF THE CURRENT INVENTION TO PROMOTE DEVELOPMENT OR CELL DIFFERENTIATION

[0191] With respect to an increase in the level of normal gene expression and/or gene product activity specific for any of the peptides and proteins of interest of the current invention, the respective nucleic acid sequences can be utilized for the treatment of development and cell differentiation disorders. Where the cause of the development or cell differentiation dysfunction is a defective peptide or protein of the current invention, treatment can be administered, for example, in the form of gene delivery or gene therapy. Specifically, one or more copies of a normal gene or a portion of the gene that directs the production of a gene product exhibiting normal function of the appropriate peptide or protein of the current invention, may be inserted into the appropriate cells within a patient or animal subject, optionally using suitable vectors. Recombinant retroviruses have been widely used in gene transfer or gene delivery experiments and even human clinical trials (see generally, Mulligan, R. C., Chapter 8, In: Experimental Manipulation of Gene Expression, Academic Press, pp. 155-173 (1983); Coffin, J., In: RNA Tumor Viruses, Weiss, R. et al. (eds.), Cold Spring Harbor Laboratory, Vol. 2, pp. 36-38 (1985). Other eucaryotic viruses which have been used as vectors to transduce mammalian cells include adenovirus, papilloma virus, herpes virus, adeno-associated virus, rabies virus, and the like (See generally, Sambrook et al., Molecular Cloning, Cold Spring Harbor Laboratory Press, Cold Spring Harbor, N.Y., Vol. 3:16.1-16.89 (1989). Alternatively, cationic or other lipids may be employed to deliver polynucleotides comprising the described GTS sequences to patients. Additionally, naked DNA comprising one or more GTS sequences, optionally modified by the addition of one or more of, in operable combination and orientation, a promoter, an enhancer, a ribosome entry or ribosome binding site, and/or an in-frame translation initiation codon can be employed to deliver GTSs to a patient. Another use of the above constructs includes “naked” DNA vaccines that can be introduced in vivo alone, or in conjunction with excipients, or microcarrier spheres, nanoparticles or other supporting or dosaging compounds or molecules.

[0192] The gene replacement/delivery therapies described above should be capable of delivering gene sequences to the cell types within patients which express the peptide or protein of interest of the current invention. Alternatively, targeted homologous recombination can be utilized to correct the defective endogenous gene in the appropriate cell type. In animals, targeted homologous recombination can be used to correct the defect in ES cells in order to generate offspring with a corrected trait.

[0193] Finally, compounds identified in the assays described above that stimulate, enhance, or modify the activity of the peptides and proteins of the current invention can be used to achieve proper development and cell differentiation. The formulation and mode of administration will depend upon the physico-chemical properties of the compound.

### 5.8. PHARMACEUTICAL PREPARATIONS AND METHODS OF ADMINISTRATION

[0194] Compounds that are determined to affect gene expression of the peptides and proteins of the current invention, or the interaction of those peptides and proteins with any of their binding partners, can be administered to a patient at therapeutically effective doses to treat or ameliorate development and cell differentiation disorders. A therapeutically effective dose refers to that amount of the compound sufficient to result in any amelioration or retardation of disease symptoms, or development and cell differentiation or proliferation disorders.

### 5.8.1. EFFECTIVE DOSE

[0195] Toxicity and therapeutic efficacy of such compounds can be determined by standard pharmaceutical procedures in cell cultures or experimental animals, e.g., for determining the LD₅₀ (the dose lethal to 50% of the population) and the ED₅₀ (the dose therapeutically effective in 50% of the population). The dose ratio between toxic and therapeutic effects is the therapeutic index and it can be expressed as the ratio LD₅₀/ED₅₀. Compounds which exhibit large therapeutic indices are preferred. While compounds that exhibit toxic side effects may be used, care should be taken to design a delivery system that targets such compounds to the site of affected tissue in order to minimize potential damage to uninfected cells and, thereby, reduce side effects.

[0196] The data obtained from the cell culture assays and animal studies can be used in formulating a range of dosage for use in humans. The dosage of such compounds lies preferably within a range of circulating concentrations that include the ED₅₀ with little or no toxicity. The dosage may vary within this range depending upon the dosage form employed and the route of administration utilized. For any compound used in the method of the invention, the therapeutically effective dose can be estimated initially from cell culture assays. A dose may be formulated in animal models to achieve a circulating plasma concentration range that includes the IC₅₀ (i.e., the concentration of the test compound which achieves a half-maximal inhibition of symptoms) as determined in cell culture. Such information can be used to more accurately determine useful doses in humans. Levels in plasma may be measured, for example, by high performance liquid chromatography.

[0197] When the therapeutic treatment of disease is contemplated, the appropriate dosage may also be determined using animal studies to determine the maximal tolerable dose, or MTD, of a bioactive agent per kilogram weight of the test subject. In general, at least one animal species tested is mammalian. Those skilled in the art regularly extrapolate doses for efficacy and avoiding toxicity to other species, including human. Before human studies of efficacy are undertaken, Phase I clinical studies in normal subjects help establish safe doses.

[0198] Additionally, the bioactive agent may be complexed with a variety of well established compounds or structures that, for instance, enhance the stability of the bioactive agent, or otherwise enhance its pharmacological properties (e.g., increase in vivo half-life, reduce toxicity, etc.).

[0199] The above therapeutic agents will be administered by any number of methods known to those of ordinary skill in the art including, but not limited to, administration by inhalation; by subcutaneous (sub-q), intravenous (I.V.), intraperitoneal (I.P.), intramuscular (I.M.), or intrathecal injection; or as a topically applied agent (transderm, ointments, creams, salves, eye drops, and the like).

### 5.8.2. FORMULATIONS AND USE

[0200] Pharmaceutical compositions for use in accordance with the present invention may be formulated in conventional manner using one or more physiologically acceptable carriers or excipients.

[0201] Thus, the compounds and their physiologically acceptable salts and solvates may be formulated for administration by inhalation or insufflation (either through the mouth or the nose) or oral, buccal, parenteral or rectal administration.

[0202] For oral administration, the pharmaceutical compositions may take the form of, for example, tablets or capsules prepared by conventional means with pharmaceutically acceptable excipients such as binding agents (e.g., pregelatinised maize starch, polyvinylpyrrolidone or hydroxypropyl methylcellulose); fillers (e.g., lactose, microcrystalline cellulose or calcium hydrogen phosphate); lubricants (e.g., magnesium stearate, talc or silica); disinteqrants (e.g., potato starch or sodium starch glycolate); or wetting agents (e.g., sodium lauryl sulphate). The tablets may be coated by methods well known in the art. Liquid preparations for oral administration may take the form of, for example, solutions, syrups or suspensions, or they may be presented as a dry product for constitution with water or other suitable vehicle before use. Such liquid preparations may be prepared by conventional means with pharmaceutically acceptable additives such as suspending agents (e.g., sorbitol syrup, cellulose derivatives or hydrogenated edible fats); emulsifying agents (e.g., lecithin or acacia); non-aqueous vehicles (e.g., almond oil, oily esters, ethyl alcohol or fractionated vegetable oils); and preservatives (e.g., methyl or propyl-p-hydroxybenzoates or sorbic acid). The preparations may also contain buffer salts, flavoring, coloring and sweetening agents as appropriate.

[0203] Preparations for oral administration may be suitably formulated to give controlled release of the active compound.

[0204] For buccal administration the compositions may take the form of tablets or lozenges formulated in conventional manner.

[0205] For administration by inhalation, the compounds for use according to the present invention are conveniently delivered in the form of an aerosol spray presentation from pressurized packs or a nebulizer, with the use of a suitable propellant, e.g., dichlorodifluoromethane, trichlorofluoromethane, dichlorotetrafluoroethane, carbon dioxide or other suitable gas. In the case of a pressurized aerosol the dosage unit may be determined by providing a valve to deliver a metered amount. Capsules and cartridges of e.g. gelatin for use in an inhaler or insufflator may be formulated containing a powder mix of the compound and a suitable powder base such as lactose or starch.

[0206] The compounds may be formulated for parenteral administration by injection, e.g., by bolus injection or continuous infusion. Formulations for injection may be presented in unit dosage form, e.g., in ampules or in multi-dose containers, with an added preservative. The compositions may take such forms as suspensions, solutions or emulsions in oily or aqueous vehicles, and may contain formulatory agents such as suspending, stabilizing and/or dispersing agents. Alternatively, the active ingredient may be in powder form for constitution with a suitable vehicle, e.g., sterile pyrogen-free water, before use.

[0207] The compounds may also be formulated as compositions for rectal administration such as suppositories or retention enemas, e.g., containing conventional suppository bases such as cocoa butter or other glycerides.

[0208] In addition to the formulations described previously, the compounds may also be formulated as a depot preparation. Such long acting formulations may be administered by implantation (for example subcutaneously or intramuscularly) or by intramuscular injection. Thus, for example, the compounds may be formulated with suitable polymeric or hydrophobic materials (for example as an emulsion in an acceptable oil) or ion exchange resins, or as sparingly soluble derivatives, for example, as a sparingly soluble salt. The compositions may, if desired, be presented in a pack or dispenser device which may contain one or more unit dosage forms containing the active ingredient. The pack may for example comprise metal or plastic foil, such as a blister pack. The pack or dispenser device may be accompanied by instructions for administration.

[0209] The examples below are provided to illustrate the subject invention. These examples are provided by way of illustration and are not included for the purpose of limiting the invention in any way whatsoever.

### 6.0. EXAMPLES

### 6.1. GENERATION OF A LIBRARY OF MUTATED MOUSE ES CELLS DEFINED BY GTS SEQUENCES

[0210] The retroviral vector VICTR 3, described in detail in U.S. application Ser. No. 08/728,963, filed Oct. 11, 1996, was used to generate a library of gene trapped ES cell clones that represent a portion of the described GTSs. A plasmid containing the VICTR 3 cassette was constructed by conventional cloning techniques and designed to employ the features described above. Namely, the cassette contained a PGK promoter directing transcription of an exon that encodes the puro marker and ends in a canonical splice donor sequence. At the end of the puromycin exon, sequences were added as described that allow for the annealing of two nested PCR and sequencing primers. The vector backbone was based on pBluescript KS+ from Stratagene Corporation.

[0211] The plasmid construct was linearized by digestion with Sca I which cuts at a unique site in the plasmid backbone. The plasmid was then transfected into the mouse ES cell line AB2.2 by electroporation using a BioRad Genepulser apparatus. After the cells were allowed to recover, gene trap clones were selected by adding puromycin to the medium at a final concentration of 3 μg/ml. Positive clones were allowed to grow under selection for approximately 10 days before being removed and cultured separately for storage and to determine the sequence of the disrupted gene.

[0212] Total RNA was isolated from an aliquot of cells from each of 18 gene trap clones chosen for study. Five micrograms of this RNA was used in a first strand cDNA synthesis reaction using the “RS” primer. This primer has unique sequences (for subsequent PCR) on its 5′ end and nine random nucleotides or nine T (thymidine) residues on it's 3′ end. Reaction products from the first strand synthesis were added directly to a PCR with outer primers specific for the engineered sequences of puromycin and the “RS” primer. After amplification, an aliquot of reaction products were subject to a second round of amplification using primers internal, or nested, relative to the first set of PCR primers. This second amplification provided more reaction product for sequencing and also provided increased specificity for the specifically gene trapped DNA.

[0213] The products of the nested PCR were visualized by agarose gel electrophoresis, and seventeen of the eighteen clones provided at least one band that was visible on the gel with ethidium bromide staining. Most gave only a single band which is an advantage in that a single band is generally easier to sequence. The PCR products were sequenced directly after excess PCR primers and nucleotides were removed by filtration in a spin column (Centricon-100, Amicon). DNA was added directly to dye terminator sequencing reactions (purchased from ABI) using the standard M13 forward primer a region for which was built into the end of the puro exon in all of the PCR fragments.

[0214] Subsequent studies have used both VICTR 3 and VICTR 20. Like VICTR 3, VICTR 20 is exemplary of a family of vectors that incorporate two main functional units: a sequence acquisition component having a strong promoter element (phosphoglycerate kinase 1) active in ES cells that is fused to the puromycin resistance gene coding sequence which lacks a polyadenylation sequence but is followed by a synthetic consensus splice donor sequence (PGKpuroSD); and 2) a mutagenic component that incorporates a splice acceptor sequence fused to a selectable, colorimetric marker gene and followed by a polyadenylation sequence (for example, SAâgeopA or SAIRESâgeopA). Also like VICTR 3, stop codons have been engineered into all three reading frames in the region between the 3′ end of the selectable marker and the splice donor site. A diagrammatic description of structure and functions of VICTRs 3 and 20 is provided in FIG. 1.

[0215] When VICTRs 3, 20, and various variations thereof, were used in the commercial scale application of the presently disclosed invention, many mutagenized ES cell clones were rapidly engineered and obtained. Sequence analysis obtained from these clones has identified a wide variety of both previously identified and novel sequences. Each of the sequences presented in SEQ ID NOS: 1-1,159 identify heretofore unknown coding regions of mammalian genes. Moreover, given that totipotent ES cells have targeted, each of the disclosed mutants effectively represents genetically engineered animals that incorporate the mutated cells and that are preferably capable of germline transmission of the listed mutations.

[0216] The discovery potential of the presently described invention as a genomics resource becomes apparent when one considers that the genes mutated/represented in the Sequence Listing were identified in a few years, whereas simply constructing the mutated cells would have taken many decades of person-hours using conventional methods of genetic manipulation such as targeted homologous recombination.

[0217] Additionally, and perhaps more importantly, the gene trap sequences thus far identified provide novel sequence information (see SEQ ID NOS: 1-1,159), and, because of the functional aspects of the presently described ES cell system, the cellular and developmental functions of these novel sequences can be rapidly established.

[0218] The cloned 3′ RACE products resulting after the target ES cells were infected with VICTR 20 were purified using conventional column chromatography, (e.g., S300 and G-50 columns), and the products were recovered by centrifugation. Purified PCR products were quantified by fluorescence using PicoGreen (Molecular Probes, Inc., Eugene Oregon) as per the manufacturer's instructions.

[0219] Dye terminator cycle sequencing reactions with AmpliTaq® FS DNA polymerase (Perkin Elmer Applied Biosystems, Foster City, Cailf.) were carried out using approximately 7 pmoles of sequencing primer, and approximately 30-120 ng of 3′ template. Unincorporated dye terminators were removed from the completed sequencing reactions using G-50 columns as described above. The reactions were-dried under vacuum, resuspended in loading buffer, and electrophoresed through a 6% Long Ranger acrylamide gel (FMC BioProducts, Rockland, Me.) on an ABI Prism® 377 with XL upgrade as per the manufacturer's instructions. The sequences of the resulting amplicons, or GTSs, are described in SEQ ID NOS: 1-1,159.

[0220] All publications and patents mentioned in the above specification are herein incorporated by reference. Various modifications and variations of the described method and system of the invention will be apparent to those skilled in the art without departing from the scope and spirit of the invention. Although the invention has been described in connection with specific preferred embodiments, it should be understood that the invention as claimed should not be unduly limited to such specific embodiments. Indeed, various modifications of the above-described modes for carrying out the invention which are obvious to those skilled in the field of molecular biology or related fields are intended to be within the scope of the following claims.

The application's sequence listing, which the Patent Office published only in electronic form, follows.

SEQUENCE LISTING (1159 sequences)

SEQ ID NO: 1 - DNA, 399 bp, Mus musculus
  misc_feature (1)...(399): n = A,T,C or G
aaaggataagtccttgtctctgggagacggggaccctgatgaatttgatgagctctttgatgctgatggtgatggtgagtcttacacagaagaggctggcagtggagaagagggcaagactgggaaaccaggaggaacgtttggccactctctttggtgangtggaggacttaacggatgatgaagttgctacatcgaaagttggaaacagtggcccccctcctgctcccagccaagagaaaaccagcgaggagctgcaagatgaattaaagaagttgcaagagcaaatgaaatccttacaggagcagctaaaagctgcatcaattaaacagcctccagggacagcacccttgcaggaaccacctggtaatgtgactgtaatttgtagcagtaatttgc

SEQ ID NO: 2 - DNA, 293 bp, Mus musculus
  misc_feature (1)...(293): n = A,T,C or G
acaactacctgacccgnctcaggagaatatgagattgcactcaacctggacctttctgagcggcaggtggggnctggntgcttgcnctgntgaattctcggctnccttnccagtnacccgtnactgcccccccnctttacncnctcaccncagnnaccgaagaccaccccatgggagagttatnaagaattccancgatggaaannctgaaantgatntgggagggagccccagntttccaacggtcccccnggggtacttgtcatgtgancaagaactgggacatgtggggg

SEQ ID NO: 3 - DNA, 312 bp, Mus musculus
ggccaagttcaaggccacctgggcacggagggcacagccagccaagacaacggtacagtcagtagccctgaggacaactccgctgactgactctgtgtggccttcatggacctgtgcccaccctgggaagctaaccatccctaatttcttcccactttctgactcctaagaggctcaagagggagttggctccatatcctgacctgcaaagggaggtaaaggcagctggggaccttgaagctctttgccctagaacatgaatcacaaccatcagcatcattaaacctccgtgtaaacagctaaaaaaaaaaa

SEQ ID NO: 4 - DNA, 270 bp, Mus musculus
  misc_feature (1)...(270): n = A,T,C or G
gactgaggtaacatttcacttgttgcctttccagtttcaagcaccanctcaccaacaaagattttaccgaaaaccttagggccaataaatgtgaatgttggaccccaaatgattataagcacaccgcagagaattgccaatcagnggaagtgttctagattgggaatccatatacccctgcacccgcaatggtcactcagactcacatagctgaggctgctggctgggttcccagtgatngaagccgagctagagaatttatagactctg

SEQ ID NO: 5 - DNA, 394 bp, Mus musculus
  misc_feature (1)...(394): n = A,T,C or G
gtactgagaaacctgatatctcaagtaaacattcaaattccactttaagaacctacgctatgccatagaccggaaagataccttcttgtgctatgaagtgactagaaaggactgcgattcacccgtctcccttcaccatggggtctttaagaacaaggacntannctagnacatcgnanntnagtngntcanaatgattacctaanatgtcatgtnnntnctgnattagatgttaganggcacagnaaaaactggnatggtaggctcataccttgaatcctagnactcaggaaatgaagtcaggcggaccagaagttcagggncatccttgtttatgtatagnttgagaccagcctgggttgcatgagatcttatctaaataaacgaacaaaca

SEQ ID NO: 6 - DNA, 264 bp, Mus musculus
  misc_feature (1)...(264): n = A,T,C or G
gactgaggatgctcagatctgagntctccatccatgggaaccatcttggacagagctgagcgccctaaatgtttgacatctttctgaaaaagggcaaanggtccancaccttcttccaaggaagccttggctgaggtagctgnnctgnttnttgctggttaatgctgannagctggcatacttntgcaggatgctgnggacactggcggctttggacactgcttcctgcngccgcacaagaattcncaaacaggaagaccactc

SEQ ID NO: 7 - DNA, 342 bp, Mus musculus
  misc_feature (1)...(342): n = A,T,C or G
ctacacaagttgctaagagaactgngaaatttttttaagaaccaaccacattggatgggtcagagagtttttgaatgaagaaaacanaggccttgatgttcttggggagtntttgncttttgcacagtatncagncactttngactttgaaagngtgnaaagtaccgnggagagnacggcggacaaatcaaagccctgnagcaggtccatcgaggacctgcacagagggagcaacctgcccttaccctgtgggcanaagngngtnccgctcttgaaaacattctgcacttccctcccgtngaaatngtaagatgctgccnnaggatccgaactgaccacctg

SEQ ID NO: 8 - DNA, 180 bp, Mus musculus
  misc_feature (1)...(180): n = A,T,C or G
ttggctgaagaggaaataaaactgagcaggaggtggnggagggaatggatatctntactggctccnaagatcctgtcnctacagananaacggncccganacggaagtncgccagccctccacantcctccaanggccattcgnccnaagactcatccacgagccccattaataaaaaaa

SEQ ID NO: 9 - DNA, 133 bp, Mus musculus
gaactgaggtgtgagctctctgcttgctgctccagtcgctgtgcttgcctgctgtggtgcctccctaccaggacagactcttgtgcttttggaaccataagccaaataaacccttccttccataaaaaaaaaa

SEQ ID NO: 10 - DNA, 189 bp, Mus musculus
gactgagcttggctgaagaggaaataaaaactgagcaggaggtggtggagggaatggatatctctactcgctccaaagatcctgtctctacagagaaaacggccccgaaacggaagttccccagccctccacattcctccaatggccattcgccccaagactcatccacgagccccattaaaaaaaaaa

SEQ ID NO: 11 - DNA, 155 bp, Mus musculus
  misc_feature (1)...(155): n = A,T,C or G
ccattgtgtgccatggcgaaccagtgagcaagactgagaaggtacctgttcttatggagnncccgttttgntggangaagatacacaaaaccccaggaaataaacgagatcatttcagatagtgngtgcgggngggaagatggaggaatatgagg

SEQ ID NO: 12 - DNA, 380 bp, Mus musculus
  misc_feature (1)...(380): n = A,T,C or G
acactcatacttgttttctaggacttacccggcatctccctgtccagagagcctctgtcgtttgcaagctgatgcggtgtcttcctgtggggtccctgggagctcactcacccttgcctgtctcccgtagcttacagatgctttatgcagccgttgtgtttccacctttccctgttgttggacagagagtctcgagggcagaccctgcatgtccaannntttaatccttcactaacatttcccacgtcagcccttgggaagcattggtcggactggatctgaatcagcacttgtccatttgccaaatggagttcttgtatacactgctctgaaatgagcagagtttaaaaataaagtaaaataaaaccagaaaaaaaaaa

SEQ ID NO: 13 - DNA, 495 bp, Mus musculus
  misc_feature (1)...(495): n = A,T,C or G
gccagatgctgtagtgtttgctggttcttcatcagtctgccttgaggaccatatgcccttgcctgatgcaggtacttcaagaagattccaaagaaacacggctttaagggtagtggggttccagtatatctaaagcgctggctacaccgtctgcatcccagctccagctcgatttctttggtggtccannacagtccacgtagcagccgccagcacagtccacgtagcagccgccagctcgagctttattgtcctgagaagcagcattgacttcattcaactcagcgattacttcctcccatttcgctgggctctcaatgaaccggtaatctgataaataactgagctcttcctttggggatcaatagcattgacttgntcctagctgctgccaataaagcagattcaccattgaaaaaggacgtcaagtcaatacttgaagcagctctggcagcaaggcaagtgaccaggacgacccttgtcccctttcggagc

SEQ ID NO: 14 - DNA, 165 bp, Mus musculus
  misc_feature (1)...(165): n = A,T,C or G
tactgcagcttgtagcatcgctgtgagactntgcgnccncctttacaaaacaangacgtcgtntgcgtccattcgttnnngtccatnnctgatgtgcagttaaanaacctgcctttctatgaagnccntgatgntctcatcaagcccncgaagtttaagtgaagt

SEQ ID NO: 15 - DNA, 265 bp, Mus musculus
  misc_feature (1)...(265): n = A,T,C or G
ggaactcttgcctggaacaaatnttgagctgcgttctcanggcanttgannngancatgttattcttttattccttttcttatttacannttnttcctnatagcctaggtcangattttaagcaagaataggggntnanaaaccatnccttganatggggtcactaacatgaccttatntntggggaaaccaaagctttacttcataaatnatttataaatntatacaacagtnttatgatnganaaaaacttttccaacaataa

SEQ ID NO: 16 - DNA, 333 bp, Mus musculus
gactgagtaaccagctgagaacatccctaacagacttgtgcctcctctcaaccgttctccctggtctgtaacagggatgcctgcccctggctcaacagcagacacactctgtcctgggtcacgaaacttactccacaggaaaaccttgtttgttaatcagaccacacacccttccactcttccccaagagcatgccacatctgtggtcatgcacctctcagagaaagtacaaagttgccattcatcatcgcatcaaggttggtggctggaaaggagatacttggcttcatcctgatatggcgttgtgggtttttttggttttcattttgcatg

SEQ ID NO: 17 - DNA, 116 bp, Mus musculus
  misc_feature (1)...(116): n = A,T,C or G
gaccctggcaccctggctgttagcatctcgcctagaacctcaagnnacctctggggcctgactgncaggcancnagtgnggggaactgctgttcanngcctgctgtttgtgacttt

SEQ ID NO: 18 - DNA, 353 bp, Mus musculus
  misc_feature (1)...(353): n = A,T,C or G
gactgaggatgacctggcaattntgttgcgagtncaaccacctttgtgcacccagccatgtncacagcactngaggaaggaggcaaactgcccacataccaggagaacaaaggctagaggagccagctcacanngcccacctacagcactgaggagtncactgtacacactgtgccacccatcactgcatggcctctagaagtatcaatgacacccatgccacatcgatggacctgtgatggcacagtcagcagctgcttcctcaggggtgggatacggggtcctcgtaactttcaaagtgactgaaaatttgttcactattataaaaatttaaggatttgtaaaaaaaaaaa

SEQ ID NO: 19 - DNA, 101 bp, Mus musculus
  misc_feature (1)...(101): n = A,T,C or G
tacacacaggcctctgagganattttaatatgttctggangctctaaanaaatgcaagagtgcctgncagtggaggtgnacgcctttaatccacctacttg

SEQ ID NO: 20 - DNA, 139 bp, Mus musculus
  misc_feature (1)...(139): n = A,T,C or G
gactgaggagatggcctgactgggaggagattgagaagccgcctgagagggtacagaanagaagcgagcgcgttanaagagcngaacctccaaagcctgaggttgtnaantatattcnttagcagtctatgctctgaga

SEQ ID NO: 21 - DNA, 399 bp, Mus musculus
  misc_feature (1)...(399): n = A,T,C or G
gactgagggagtcagtggtaggganctctcttgggcacccttccctcnttgaggtnntanggngttcccagaacncaacacnnnacctgcttnagnancctgnggaagcaacggtnccaggntttcctttgtgactgcactgngatggttgnaagnncccanctcttggcccatcgngctgngctggcctcctgcagcccattctttnagcttttctacaaggagcgngaatggnacaagagggacctggagcgtnttctcanntgagatngnnacggccccagcctttgggatgctttgggactttatgtanggtggccagcnggcccttacgggagatactgactctagaataggtgctagncactagccacgatactgcgcacattgacacgacac

SEQ ID NO: 22 - DNA, 377 bp, Mus musculus
  misc_feature (1)...(377): n = A,T,C or G
gactgaggtagaatatatggctgttgtttgggactggtacaagtttcctcagctgctctgtgaaggtgcacctggatgcaggtggagaagcaacatagctgaagtccagcccagtcgtcttgccggctgcagctcagccggctctttccagccatggcccaggtgggagccacagtgtgccaccccacacatntcttcccgaggctgcagaggtcccgacatccctcctctttattttcctgtttatgcacagcatgcgtaaacacatgcgttgcctggnttcagcgactccttttcggncttattgctggaccctccgagtaatactggaaaccttggattttntaaatgaatctaaaaataaactttgaggaaaa

SEQ ID NO: 23 - DNA, 407 bp, Mus musculus
  misc_feature (1)...(407): n = A,T,C or G
gactgaggcacaaattgtttttctggaggctgaaggtccctacagcctggatttggcgttcttgtgggctgtggtaccccagaggtcccagcagcccccgcttcagtgtcctgccttgagaagtgaggagatcaactgtttacccatctgaggaggaagatggtgcttcttgaatgacaccaccttgctggccccagggacccgtggccaggcctctgttagggaaggggccccatggggacactgaggctgcaggcccaggggggtccatctgcagctctggcggncctcacttccactgtgagctgcttgctgctctctgctgcaagctctaattgttctctgtagccggtgagtaattgagaggtctttgaagggaattaattaagntacttattgactgtaaa

SEQ ID NO: 24 - DNA, 128 bp, Mus musculus
  misc_feature (1)...(128): n = A,T,C or G
gactgagggtgactcatgcctgtaatctcaactctttggaanacggaggctangatggtgagttcaaggccatcctgaccaacatagggagactctcctccataactcagaatacaattaaagaaata

SEQ ID NO: 25 - DNA, 331 bp, Mus musculus
  misc_feature (1)...(331): n = A,T,C or G
gactgagggcaccaacccggggccagagggacgcaatgtaacagcctcacctagtctggattttattttgncttcaccctccctganancgtacgaactgacgtgaggaggtaaggataaatgtccttacttagtagttaccactgctgtgtacatctaggtcccggctctctngaggntctcttgtcatttccagcctaccctaaggtcccctgattccgtatatttattttcggggaggccggtttcatgtccttctagnttatcacatgatcagncctgtgagggacactgggtgtttccagaaattacattcacaaaaaaatcatgc

SEQ ID NO: 26 - DNA, 182 bp, Mus musculus
  misc_feature (1)...(182): n = A,T,C or G
gactgaggggactggtagagctgangtacgccagcttctccagcattgctgcagcancaanaggagcttgtaattttcnacggaagcccgnagacactgntnaantagcngacatacatagagccntgnagaaggcngaggatggagttncngnctctactaggaggctcttaaagtggaaa

SEQ ID NO: 27 - DNA, 402 bp, Mus musculus
  misc_feature (1)...(402): n = A,T,C or G
ctgagtgccccctttcaangtctcagcatcctnacgctacctcctgccgccantngcacctgggcgcccnannngntgaggactggangttatactctagggtntatnatgctgatnngnccctcaatactganctttgnnggattgtgtatatacctcttgaccangtnacaatccatgncnagggtctctagctattctgaggatggtggccacagcatgttanncttaatgaaaaatgctagngtgtggcgctatctgcatagtgcggtggacatgtccggtattactgaactccaaccananattggctcattgngtnttcttgctttagnngcctgaacganccaangcaaccatccaanacaactctttacngctnacaaactttccatatttatt

SEQ ID NO: 28 - DNA, 213 bp, Mus musculus
  misc_feature (1)...(213): n = A,T,C or G
gactgacctctgacctntangccagccccagttaaatgttctncttataanagntgccttgtggctgtnganacggctcaccaggtanaagcaccgacttaatncaggtagctccacacttaatcgcatcgncanttcctcnannagcctctgangncagntgctatgtcncacagaacattnnagggacccagagatcacttaatgcaggca

SEQ ID NO: 29 - DNA, 417 bp, Mus musculus
actgagatctgtctactttttattcaaggtggtccccagctctctcagcccttccggatccccatctcttcccactgtcgagatgacactgaaatgtgggagtctgagcagccgtgagaggtaatcaatggggaatggttccttcctggccaactgcaaggagggacatcaccaaaatccaattgtgctggcagcttcgggtcgctgggagcatcctgtcccgttagcaggtcccattagcgtttgctgagtcctgggatctatagacaagtgataactttatgtggactgagcaaatcaaggaacggaggataaattctcaacactcttggtgtgagaagcccaacatgttaatagcctgccctttggacatttactataatggttctgcattaaagtgacaaagtgttaaacaag

SEQ ID NO: 30 - DNA, 181 bp, Mus musculus
  misc_feature (1)...(181): n = A,T,C or G
gactgaggggtccaagtactgcnctttggntagtcanacggtgagncnctntggacngacnggctgccttnctccttctacccctcntnncccttctgctttagatttatntatatatgtgaaagcacncttgnagcnnntgtaggacacactagacgagggcaccagatctcattgtggg

SEQ ID NO: 31 - DNA, 259 bp, Mus musculus
  misc_feature (1)...(259): n = A,T,C or G
cctaagcgcgtggcatgactggctggagcacaccctgcgttcccaggaggttcacagatctctactggagccgctgctgaagatgcgggaatagnccagagaaaatcccgaaatgattgaaaaactaaggctcagcagactgattcctggcagcaggctgctctctcggnttgntccttttgatgnactccatccaggaaggtttttttcatcgatgctttaagggtctactcctctctgcatggcttccttttctcat

SEQ ID NO: 32 - DNA, 178 bp, Mus musculus
  misc_feature (1)...(178): n = A,T,C or G
gagctcttgggaaagcaagatcacatagnnggagaaacttcagctggctaggtttgctgtgagcatcgcttcgcatccacgccctgngatcgacacccgtgaggggctggnccaggtgactgcgctctgagcgatgggctgntccagcagcgccctnaacaaagcgggcgacagcagc

SEQ ID NO: 33 - DNA, 138 bp, Mus musculus
tatttaaaagtaacgaggggatcaaacagtgctcattcttcatgcaaaagttgcacagaagtcttacggaaatgaaaaacgatttttttgccctcctccttgtgtgtatcttatgggcagtggttggaaaaaaaaaaa

SEQ ID NO: 34 - DNA, 242 bp, Mus musculus
  misc_feature (1)...(242): n = A,T,C or G
ggactgagggatccacccccctcttctggccgctgagagcacaaggtttgcaggcagttcctgtacacacagntnggcaaaatactagttcntataanagtgtcagaagtctgggctgnagaggtggntcacnggttnnnancactggntgcttgcnnttagcnnagnncntgagnttancgtcacaggaacctcgataggngggctnacaacnatctgtagtggggatctgatgccctctt

SEQ ID NO: 35 - DNA, 240 bp, Mus musculus
  misc_feature (1)...(240): n = A,T,C or G
tgaggttgtctgtgtgagacgccgtacctctgaaactggagttccagacagctgtgagctgccatgcaggttctgagantcnaacctgggtcctgtggaagaagcactacggcttgtnttncctaaggntngntagtttctntnccagaaaccacaaggtgnncncacnaccatccgtatcaggatcangacgncntntnctggagcgnttgaaganagctacncgtgttcttacatata

SEQ ID NO: 36 - DNA, 187 bp, Mus musculus
  misc_feature (1)...(187): n = A,T,C or G
agactgagcttggctganngaataaaaactgagcaggaggtggtggagggaatggatatctctactcgctccaaagatcctgtctctacagagaaaacggccccgaaacggaagttccccagccctccacattcctccaatggccattcgccccaagactcatccacgagccccattaaaaaaaaaa

SEQ ID NO: 37 - DNA, 348 bp, Mus musculus
tgaggtctgctgcctttcctggttccctgttatctttgctgtctttgctgagttcttggcagttatatttctgtggcagcctgtgaagatgctgcctttggagagggtgttagcctctcctagaagctctcctccccaaccagaaccatctactctgcggtcaaaagatacagtacagcaggaagaacctggccagcaggaggaacccatccagcaggaaggactcattaagcaacaagaacctagccagcaggaggaatgcaggaggcaggatgaactcatccggaaagaagaacccatccagctgctggaaactaagtcagagggaagaactcagtgagaaaaaaa

SEQ ID NO: 38 - DNA, 158 bp, Mus musculus
  misc_feature (1)...(158): n = A,T,C or G
acaggacggacggacggactncacaanggtgcgcgtgtcggacnaggccgccangacngancgattctcacggaggaangagcacgccnacaaggcctgactgcgtacagacatgtncccctcaataaaattgcaggtngaaatgggaaaaaaaaaaa

SEQ ID NO: 39 - DNA, 145 bp, Mus musculus
  misc_feature (1)...(145): n = A,T,C or G
agggtaaagtgtttttatgacacanatcttcaatcangtgtaacanntngtgatgctccacatactaaactccttgtgctgttactatgncngcannaaccgtagntcatangccaanagaatttnntagaatgtattgggcttg

SEQ ID NO: 40 - DNA, 313 bp, Mus musculus
  misc_feature (1)...(313): n = A,T,C or G
ctggtcatcagtactcacctgcagggcctcacagcaccagctccacatccaacaccttcaccacaaactccaggcagagctggggacagaaatgaagcgacctgtgtgccggtgtcaagactccaagtcctatcccagaaacaatggagcttggagcaatgactcattcagactcccagcagccccagcgccaccttgagcgcccagatttggaaaacannttttttttgtnnaggacctgtaatttaagcaagcccagagggcctgggaggccagcanagcaccttntggtacactcgcccctggtcaaact

SEQ ID NO: 41 - DNA, 305 bp, Mus musculus
  misc_feature (1)...(305): n = A,T,C or G
ctggacatcttctttgtgaggggnccccgnccagcctggctactcctcagctcactgagcttcgtgangactagngnctctgaanaggttctgctcccatcttcaagaacttctggtccgactagaaccagttgatgcagactttgatcaccttgggggtgggtgtccgtgggctncaccaacaactataagcatccctcccccatcatctgntgngtntntggctggcaagccttaatcagcnccacgtggatcttatcatcatgacttctgagggcttcgatgccttctgagactcaaaataa

SEQ ID NO: 42 - DNA, 366 bp, Mus musculus
  misc_feature (1)...(366): n = A,T,C or G
actgaggctcctggtgcnagtgacattannntctaacaggaagcnaacatcanactganngctnagcatacacagcggacagacggcagagtgccggaggaggagtggagggaggtagctggagggcagccttcagaacacgggtggggggactgcacacagcaggaaggaggagaaaggcagggcagctggtagggcctcaggactgacagcgggcatggagctttgggcgttactgagatagcctgggctcccacacacatgggtgtncatgtgatnaaggaataaatggggcctggggaacacagcagggaggggtggcaccaagaaaacattgggcanatcagagacttggagctgcctcat

SEQ ID NO: 43 - DNA, 355 bp, Mus musculus
  misc_feature (1)...(355): n = A,T,C or G
gactgaggctcacctggngctcctatccggttacctacctgctcgattcttnccccaaccctgcccaggacangcatagggagatattacaaatgcggccaaagactgtgancaagataggtggatatagtgtgnaaagctcacgcagtactgtattttgctgtcccaggaggaannaaganaatgaataggactgtanctctgacgcnggtgacttacaactaataagaacttattctggacnaatnnatantgnatnttgtnttacanaaaaantgaatgcttgttgcacagacaggtattcagacnaaacactnatacacataggccatatagaaactttcaaaaaaaaaaa

SEQ ID NO: 44 - DNA, 296 bp, Mus musculus
  misc_feature (1)...(296): n = A,T,C or G
actgaggattgctttggctgggattaagatatgaaccaccatacccagctgcaaaagaagttttaataccatttgcagtatcagacnnggaacctanactaggcataaaccatctttggccatcaagctaggatgaacaaaggactgccatctgctctgcccttgacctatataagaaaaccaccaccaagttgtctctttgccattgccagagggggctacatgcatctttttanncctaacagcttggttttagagtgtatgtacagagaatcatcatgaattttttgttcagg

SEQ ID NO: 45 - DNA, 264 bp, Mus musculus
  misc_feature (1)...(264): n = A,T,C or G
tttgaccgaatagcaggcatnggtngaaccccgaaccaggaggaccaagccgctgggcatgtgactcaaggtcagngggccanatanannttgncgactnanattggganganggagatgggagcactcagtgnccttntaccttgagaagacattcttaaccnncnngtcctagggcacaanctcaagagacctgaaggagttgccaatatnnnaanntgnggctctttaaacacaaaacagngtttttcttataccatcctt

SEQ ID NO: 46 - DNA, 261 bp, Mus musculus
  misc_feature (1)...(261): n = A,T,C or G
aaccacaggagctcccanggactnagctatcgaacagggatgacanatggntccngctgcntacanngcagagnataggccttggcangcatcanngggaannaggngcgcttgagtcctatgaaagctngatnacatgcccnanaggttggntanattgagggaggaaaggcntggaatgcatcaanggggaggaggggcgcttggtcctatgaaagcttganagatgccccagngnaagggaattgaggggtgggaagg

SEQ ID NO: 47 - DNA, 145 bp, Mus musculus
ctgcctgactggagatctgatttagagaactgatacagctcttttagaatgttttttagtagttattaagagaaggctctcagaagagcaagcacagctcttacagaatttttttctggctttctgattttgaccaaaaaaaaaa

SEQ ID NO: 48 - DNA, 370 bp, Mus musculus
  misc_feature (1)...(370): n = A,T,C or G
actgaggagctgatggtgccgtgggagcctntattcnnagtggatggccagagacagngcttctgagctttgataggattcactgtggngntcatccncagggaagagggtctcctaanagtnaccctgnncagaccttgtcagagcctgganaanagctatgctctcnagccagggtgtctatggnnaagtagagtnaggacttncttatacctncagntngaccaagcnaaacacaaaccctgncctgnnggactgaaggagcatattacnggtgtactctgccaagtcatggactgcggaggagacatggtagngctttaagtaaagactagaacggnttccagcccagtggctcgaagcactttta

SEQ ID NO: 49 - DNA, 150 bp, Mus musculus
  misc_feature (1)...(150): n = A,T,C or G
cttgcttttttatgctncagntcactgtctatgttcggaccgacagtctnaatgcctggntctcactggtatttgtaccaaaatacactcacaatgttgnacagngcttttgaacaccaaagaaggcntcaggaatcctttgaagttcgg

SEQ ID NO: 50 - DNA, 126 bp, Mus musculus
  misc_feature (1)...(126): n = A,T,C or G
gactgaggttttctctggctatcctggactcactttganaacgaggctgtccttgaactcacagagatctgcctacctctatctcccaagtgatggaattaaaggcatgcaccaccaaaaaaaaaa

SEQ ID NO: 51 - DNA, 284 bp, Mus musculus
actgagaccagtttaagaacaccttggttggggctggagacatgacttggcaattaagaacatgagctcttccagaggtcctgagttcagctcatgcagaaaagttccaatactaaaatgaacactcctttctgcctctttgtgcccctgccctgtctatgtagccagccttggctgtcctagaactattagaccaggctggccttgaactcacagagacccacctgcctctgcctcccaagtggattaaaaatgtgttactgggagtgggtgggtaggggagt

SEQ ID NO: 52 - DNA, 271 bp, Mus musculus
tgaggtggggtctttcaccgggatccatcttcagccgcgggtgactgggcagcatccttacttagctctgaaagtcgcatcctagggcagaccactctccctctcccatccacacaaccagacactcacatcaggtcgcatactggcttcacagcagtttgagaagaaggaaggaaggaatcgatcataatttcaaatctcttgaaatgttactctcctttatgatatttagaaatgtatactttgtggtttgtactgaattaaaaaaaaa

SEQ ID NO: 53 - DNA, 150 bp, Mus musculus
  misc_feature (1)...(150): n = A,T,C or G
cttcaggcactagtacagataaggatgcactggacctatgatnnatgtgcatagtgaactngantcganaagaatgggctttgnttggatcctncacagaagcgtcttctactaagatgtgatgctggagacctactccgcataattaat

SEQ ID NO: 54 - DNA, 157 bp, Mus musculus
  misc_feature (1)...(157): n = A,T,C or G
tttttttttttctttgaagagggctcngcaatggtgttgccnagtaaggaagctggatctgannggaactgggcnaggaggaattgaatatgatcaaaatacattgtataatagtgtcaaagaattaataaacatttttaaaggggaaaaaaaaaaa

SEQ ID NO: 55 - DNA, 175 bp, Mus musculus
agagtcctgttggaagtatcagtgagttggctagatgaaggggacctgcattcagggatcttcaaaagacaaagacaccaccacagtgttaaaatggttgaggctgtgaaaataaattagcaataaaaataatactcagatgggacattccatgtgccaactgatcgcctaaaaa

SEQ ID NO: 56 - DNA, 168 bp, Mus musculus
  misc_feature (1)...(168): n = A,T,C or G
gagactgaggtgactgaggatatcaactagntagcacacctacagactccgcccttccccagggcctgagtgaacagaagctgggatgatggaggacggnctactggctgatgggaaaggcaaagaatcactgagcttggaccaagagatccttggaaagctgggctt

SEQ ID NO: 57 - DNA, 134 bp, Mus musculus
  misc_feature (1)...(134): n = A,T,C or G
gatgatgacttacatgcttacggaggctcnanngaagancccttgtgattcangtccgtncttctgtggncttnaccatgggnagtcncaaggctaccaanggtcttcatactatcacttttctctaaaggaga

SEQ ID NO: 58 - DNA, 244 bp, Mus musculus
actgagataaagcttcagtatggaaaagccccctctgccacagagacgaggaaatgggcagaattggtgtgcaaaggaactgaattggtgtgtaaaggaactgtgggagtccagaaattgttggtcccttcagggctgttctgagtgtcattgtgcagctttctgattggaggttctctcgtgtgatacaagtgacataaggttgatttcttttattaagagaatacttctagagaaaaaaaaa

SEQ ID NO: 59 - DNA, 199 bp, Mus musculus
  misc_feature (1)...(199): n = A,T,C or G
taagaggctatcaagtaggctgaaagaatattttcagaagcatagactcttcggaggatactgcagttcatgagatntcaaggagagangtcaccactcctaccttcgcgctttcaagcatagcatagaactatgtcattgtccgaggttatgattgctaaagtgtaactgggaaatcaaaaacgttcttacttaaaaa

SEQ ID NO: 60 - DNA, 219 bp, Mus musculus
  misc_feature (1)...(219): n = A,T,C or G
tgtaaggaagaagcctngcctataaggtctggagagntancaccgattcctgnnctggggctgagactgngctcacnnanctgaatctaaaggcttaggagggcaaaccaacatgtaaacctgctggggnnctaatctnacaatgcggagggtncagacnnaantgttggattnttcnaangcangcctangaaagaagataacatgacccgagctgtt

SEQ ID NO: 61 - DNA, 256 bp, Mus musculus
  misc_feature (1)...(256): n = A,T,C or G
gactgagggttctcgggctgttaacatttcttgccaatttctcctgagatggtgtcttcatgctgccaagaagagaacacagaattctatctcanccncaggaggacaccangacagcgccttcccntgacccagcancnccaccaggctgtaactgtctcttgctctctcagatgaacngctgcttctgtggcctctgaacaaaagcaacagcttcacactctacataccataaatgtcaccaccctaaagtgaa

SEQ ID NO: 62 - DNA, 120 bp, Mus musculus
aggctctgcctcccaagtgcacctacaagcctagtcctagttcatattctatgtattagaaaatgtccttgtccctaggaagtaagcattaaagaagtattcagtgtcaaagaaaaaaaa

SEQ ID NO: 63 - DNA, 220 bp, Mus musculus
  misc_feature (1)...(220): n = A,T,C or G
aacgcccttctcgcaaanctgagccgagagtgttgagtgactanaaagtaagcagcccggntttnaaagctgcggacgctggagcgcatttccaaggcttgtctgctgtaaggatggcaccgtcctcctcttagatctgtctcaagagaattgtatgttttactttataaaacatacagtatgtcaaaaaggcaaatngnncccccaaacaaaagcttat

SEQ ID NO: 64 - DNA, 132 bp, Mus musculus
  misc_feature (1)...(132): n = A,T,C or G
cgaggttctcaacaggtgatgctgtggnccctcatttttttctccgctcccctagngctggatggaggacnccttanagtgaaatgananaccaggagaataacaacaacatttcacgtaacccctttgctg

SEQ ID NO: 65 - DNA, 300 bp, Mus musculus
  misc_feature (1)...(300): n = A,T,C or G
aactcagatctgccccctgcctccgtctccaanagctggttgggcatngaangtgagnccanncangcncaggngcnntgattntangcgcgaggttttgcttaaatncnagcaggttgggggnttactatatacatggaatcttatgaggcacctgcaaaccttntcatgagtcatttgttgttcagcaagggaatctgacaatacaggaaggtgttcgtggtaagccttaccaggccagatggggtnatgagattcttctgctccagactaatagaagaaccctcatttcaagatgaa

SEQ ID NO: 66 - DNA, 257 bp, Mus musculus
gactgaggaaagtggtctacttctgtgcttcaccctcagtccacattttcaagggctccacgtaaccggtggttactgcgatggatagcatgtgcctatgggaccctgaagtttatggcctcaacacagcgcttcttgtacagaccttgtctagtgaatgaggatgctcacctgagttactccagagaaggctgcagagtcccccagggcagtgatccttagtattcctccatgaacatagtctgtttcatccctca

SEQ ID NO: 67 - DNA, 240 bp, Mus musculus
  misc_feature (1)...(240): n = A,T,C or G
gactgagatctcgctgcctnagggagcactacangcaaaggngccgatgaacncagacacgcctntnaggcgcatgagccagnanccactattctgcttctcaaactgttctcttcagtgtttgtcacactgacagacagctcacaaccctcatgaaggagtttgagccacaggacccccggcctcagactcagaaactatgtgaggtatgttttaagttgctaaatttgaaattcgggg

SEQ ID NO: 68 - DNA, 336 bp, Mus musculus
gaactgagagctacaagctggtggaagagccggcgggcggctcggagctccttagctaccacaagctccacacttgtcgtgcttagcttcactcgacccgccacacctcgaaagaccagggaacaggtccgccaactgtgcagagcggacgttgcaatcctggggaggaggccggcgcctacacacagccataaccggagcaactggaaatgacagaaagcctagtgtttcccggaggcaccgcccagtcacttccggttccgtaagcctattgttcccgccctcagcctacactttcaacaaaacttcgggttctggtagctccaaaaaaaaaaa

SEQ ID NO: 69 - DNA, 172 bp, Mus musculus
cagctctgacccctgactcattgttggaaacctcttcctgcccggctctgcatccatgcaacagggaccggaaacctgctctcccctgtctcctgggactgttgggggatgagtcaaataacgggcggggaaagctagagaagttgaaagaggttccttaccaaaaaaaaaa

SEQ ID NO: 70 - DNA, 294 bp, Mus musculus
  misc_feature (1)...(294): n = A,T,C or G
gactgaggatgctccggtgagctgctgcacanggaaggagncagaccctctatttaagacaacanagacttccggtctcacctgaactgcaatctgaagtgttcatcagctctaccactgctccagtctgtctccagattgcttacctaacacactccagaactgattacgcatgctactgttcttctgcacgtgtgttatatatatcattgnttcttctacatgattgcaatcccctgtctgaaaccatgccaagtgcagaagcaatgcctggaaaatctttttgaaatggaa

SEQ ID NO: 71 - DNA, 180 bp, Mus musculus
agactgagcccagtgaccgcatgtgaagaaaactcctaccgatgggcagagacacatcaacattaggataaaagaccggccatggaagccatgggctgctgcttgctagcctggctcttggtgtcgcttatttttaagtgagtccagttgtgtgacattcacattattctcttcaaacat

SEQ ID NO: 72 - DNA, 341 bp, Mus musculus
  misc_feature (1)...(341): n = A,T,C or G
aactgagggactcatgncacctagtaataacaantgcangtncagcttcagantttcagccaacccttttacacttccagtactagaganaaggaacaagcngtcacttgcgtgcatgcatcatgatgccgnncttcacagctagtaaaacgctgctgacaagctttcagaanacactcagnaccccagcnctacaggggaaagaaacgtnaaggtctcctcatgnagcctgctctcgcctcgagtttataggcctactacattttttacctttgtaatgtttaacctctgtaatccaaagccccttaattaaaaactgtcagtgaatctggcagcacatg

SEQ ID NO: 73 - DNA, 132 bp, Mus musculus
  misc_feature (1)...(132): n = A,T,C or G
aaatactgctcagtcggcnctnnctcgagaacattctgattgatggagagacannctnggactttgacctctccagtgctgccaccaagcaagagtctccttcatttgtaatttgtggttattttgtttctg

SEQ ID NO: 74 - DNA, 113 bp, Mus musculus
  misc_feature (1)...(113): n = A,T,C or G
tagatcttgtggaatgaaancttnagctgtcctcgtcgnnnttacnctagnngtggagcatggcggctggattagtattaataaatatattttcttcttcggaaaaaaaaaaa

SEQ ID NO: 75 - DNA, 123 bp, Mus musculus
  misc_feature (1)...(123): n = A,T,C or G
ggctatgggtgtcccaggtactgacaggaccacaccattggtgnctttantaancttgctgnnggctgncgagatggctcanngnttaggcagcntcaactgctttnccgaaggtccccgacg

SEQ ID NO: 76 - DNA, 287 bp, Mus musculus
  misc_feature (1)...(287): n = A,T,C or G
actttgcccacttagcgtcctggtatagcncaangatccttncnnnangacnnccgnacctntttccgactactacangacacacccnttccaccttgctcctggngctgcaantgcacggnggcgctattgagccctccctgtgtcagctngcccagaagtacaagtgacaagatgatctgctgcgagtactacacatgcctgcaccctcgtgtattcgactgcagcaagaaatggggccataccaataacctgcgcccccaaaacaaggtcaaataaagctgagg

SEQ ID NO: 77 - DNA, 130 bp, Mus musculus
  misc_feature (1)...(130): n = A,T,C or G
gagactgagcctcacgttggtacccaagatgctcagtgctctggaagaagagatggcgtgacaccccccccccaacaccaccaagcatttgtttgntaaggatgcccaggtcacctgggtgctcaaataa

SEQ ID NO: 78 - DNA, 104 bp, Mus musculus
  misc_feature (1)...(104): n = A,T,C or G
agactgagctgggagtnttgtcctggtgctatnctggaagcatgcgcccaagacctgcaggaagggtgttaatacctatgtaatacatagaaacttccagaata

SEQ ID NO: 79 - DNA, 395 bp, Mus musculus
  misc_feature (1)...(395): n = A,T,C or G
gaactgagatcagccgtcctctcgctggccctgaggggagccaagaccttgtctggcaacatcgactgccacgtcttccccttctcccactncggcaagagcttcatcaaatgctgtcatgtctcttcagacagcttcatccagttggtcctgcagctggcccacttccgggacaggggtcaattctgcctgacttatgagncagncatgacccgactgntcctggaaggcagnacagagacagtgaggtcttgcaccagaaaagcctgccagtttgngagagccatggacaacaaggagacagacnagcattggcttgccctggnncgagngggccgggacaagcaccangctntactgaaggngganangaannggccaggggaatgacccgt

SEQ ID NO: 80 - DNA, 198 bp, Mus musculus
  misc_feature (1)...(198): n = A,T,C or G
ctgagactgagttatttgtgatggtatatagctatcctccanagcctgggaggtggaagtcgncggaacacgagttcaaggtcatcctgtgctgtctaacaaaccgagggaggcctgcagttcagtcaatcagcctctctccctctcaaaaaaatcaataaacggggccagcaagatggctcagtagataaaaaaaaa

SEQ ID NO: 81 - DNA, 179 bp, Mus musculus
  misc_feature (1)...(179): n = A,T,C or G
agactgagctggagaannctctgattaccaagcagatggattctaacgncatngtcttcactctacagatgagtaactcgagcttcaaagatgaaaaaagaaaattttctaaggacccaggtcttgtatttgcttcagctctatgacttcattaaattctcccagcatctctcaaaaaa

SEQ ID NO: 82 - DNA, 140 bp, Mus musculus
gctggctggaagctcttctccttcctcccaggaaactggaaaatgctgtctgtctttggtggacacaagaagagggctgtcgtccgggtttccttgtgagccacaataaagttgattaattggcagtgacaaaaaaaaaa

SEQ ID NO: 83 - DNA, 293 bp, Mus musculus
gactgagactgggcaattccaggcaattccaggccttagaagccacccggccggaggcaaggacaatgagtcagcactgtttccagacctcccaaacaagtttccagcccccacacccggtaatggaatgtccatagagatggacccaacagattaacagtgaggtcatctcatgtgccttaaatcaggtctgcaagctcacttgggggggtctatcttagtaatggggagaccccagcatgttgaacttctgcagaataaaaccctctttgcatttacatactaaaaaaaaa

SEQ ID NO: 84 - DNA, 133 bp, Mus musculus
  misc_feature (1)...(133): n = A,T,C or G
atgtctcctgcccacatcctgantggcttcnttaaggtganccactcctctcttcactgnagagtnntggaancctggnttccacagtncgtnancangagcctacatntgcgtctcctccagccatcggagc

SEQ ID NO: 85 - DNA, 118 bp, Mus musculus
  misc_feature (1)...(118): n = A,T,C or G
caggacagcagggtggtntgnaaaggtgcctctcncctngagngactgtgtcctacannggatctcatcatcgcangncctnatctctagcatatcgcangccatctcatgcccggag

SEQ ID NO: 86 - DNA, 135 bp, Mus musculus
  misc_feature (1)...(135): n = A,T,C or G
gaactgagactcttgcaccancaggttggtaagcactacantcccancacaggagatggtgcaagtccagagggattcanggtcatcctgagccgcangcaatttcaaggccancntgtctcagaaaaagaaaaa

SEQ ID NO: 87 - DNA, 205 bp, Mus musculus
  misc_feature (1)...(205): n = A,T,C or G
actgagaacattgcactcagagagaggacgttgactagtangatgatggctcagcaaggcgaggtgcctatttncaagcctgacaaccggagttcaatccccatgacccatgtggtaaagagagaacctctcacctctgtgcatgtgctccatgcacgtcaatgcttanacgttaaatattaaagacttcggtgaataattacaa

SEQ ID NO: 88 - DNA, 134 bp, Mus musculus
  misc_feature (1)...(134): n = A,T,C or G
cagaggaaatacaaacgatgtncattcactnggatagcacatgcgtggaccaagcnccagggctttggttgnnggncgccatgactcttggnatnganctactncatgtatnaggaactctgggccagccctaa

SEQ ID NO: 89 - DNA, 172 bp, Mus musculus
gagactgaggtggggtctttcctgacttcgcttctgacctctgtgagcaccaagaatttacgcggcacagggaagcgctctagaagcaccctcgggcttgtggtctttgactttggacccaatcacaatcaccttattaaaataaaacatatataaaccattaaaaaaaaaa

SEQ ID NO: 90 - DNA, 265 bp, Mus musculus
  misc_feature (1)...(265): n = A,T,C or G
cttgtcgttagcttcanccanatagagaaaccctatcttactctccccagancnctaacaagaacactaaaaggagcaatggactcanaaggacacgtnttgtgtgttctctcttaatctgagtgtggantgtgtggaagtgaggnacaagctggatactgncaacaggcanccntaaangtgtcnnaggggggcctngcctctacacttgctggctctnctcccccatgagantgggctttcggtaagccatgaacccatcatt

SEQ ID NO: 91 - DNA, 268 bp, Mus musculus
  misc_feature (1)...(268): n = A,T,C or G
actgagagccgagaggctgcagagccaagtatggctctnagnggaaagtnnttgtctnctacggggggaaccacttnctgaggctgcttcagttnccagcctncgcctttgggattccggtgtacactgaagaccaactganacatccagnctnacanactgaacagngtcctggattcctgnactttncannaggaggcngccantgttgnactaactggaccatantctgnacactactctaagaaatccctctctctacgataaa

SEQ ID NO: 92 - DNA, 257 bp, Mus musculus
tctctcacttccctgagcctgtcattgaacactgcgcctggcctgaggagggcttccaaggttgatgagcgatgctgtgcactttcctgtcacaccctcaccggtgaacactccatgcttaagaattacctgtttgatgtactcgtgatactgggaatccaacccagggcctggtgcacagctagacaagcactgttgctgggctctaatccaagcttagcttagaaaatacgcgggggtgggtgggtaagggggac

SEQ ID NO: 93 - DNA, 210 bp, Mus musculus
  misc_feature (1)...(210): n = A,T,C or G
agactgagaatggaggaagagcatttggccatcatctccaagcctgcatgtgtttatgtgtttatacctgcgncccagcccttgagcttttganactccaggggaaaactttgggtggggacgctgcaggatctacatgcggatntcttctgtacatggatagnacgggtgatggtctgcgtacctgncataagatccctgaaggagtaa

SEQ ID NO: 94 - DNA, 109 bp, Mus musculus
  misc_feature (1)...(109): n = A,T,C or G
gttggtgctcggaagctgcancactgcgntctattttgactttcancagtggcttantgtctctgcccaggtgacaagtgactgtattaaaagcaaagcctgcctcctt

SEQ ID NO: 95 - DNA, 480 bp, Mus musculus
  misc_feature (1)...(480): n = A,T,C or G
gaggggaagcttgccaaacagctatgcagagttgtgttggatcantttgacaaacantattcgaaagaacttgggnattcctggagtncantaaggtcagtatggttcntctcttgntattttgtgagaggaaagggaagtatgtagcnaatacctccttgagagtggcacagtccangagggaggaggtgactgtacattttatgtgtgaaggaannacctggcatgtaaaaatgnggggcagatagnaatgccctctcaagcacttggcttttatctagaaaatggggaggcnccacattttaaaacancgctgtaataaaaatcctaacttggaaganatttaacttantgaaattcaggtaatacccaagnccttaaanggccagnggttcctcttatcttagcntaaagtcagggctttatttgnccntttattggnccccatgcccncctgcatggggagcacattgtgcccat

SEQ ID NO: 96 - DNA, 294 bp, Mus musculus
  misc_feature (1)...(294): n = A,T,C or G
gactgaggacgagtggatgcgactctcagcatccctgaaccatagtcctttgaggatacaggaagacatctgaaatctcaagatcaaaatacgagaaggagaagtctgagagcaaatgaggtgtcatctatggagaccttctttgtaaaacaacaacaacaataacaaatgacaggctctctggggataatagatagcttgcttgtgcatggggcacagatacttaccaattccacntaactttgccttttaaaatgtctgtatggcacactanactacatgatcaggagaaag

SEQ ID NO: 97 - DNA, 520 bp, Mus musculus
  misc_feature (1)...(520): n = A,T,C or G
aactgaggaaagcagncgtgaaggaattaggcaagggatatcggtgttttgtttccacgtgcacgactttgaagcagaccccacatccctgttactgacattcttcaagacaaaagaaaacatgtctgtctgtgtttaaagtctgaggaccagaagcaaagcattgatgtttggtgctcgcccttctacccctcagcagtggcaacggtgctaacctcaccctttcgtcctcctgtgtcccagatcgggactaaaggaaagcttggctcttggatggcgtgtgtgacctcagcctcctgcaagtagcaggattggcgcagtcctgggctgcatgccaagccccgtgccactacggggatctcacattagggaactctcctgcgaggtgggcgcacactacaaagggtgtttctcaccgagcctaagaaatgcccacgcaggttcgcctaacctcattggctccgtcttgtgctgaggaagatgtgatttgngctacatataaccaagttaggaagattac

SEQ ID NO: 98 - DNA, 120 bp, Mus musculus
  misc_feature (1)...(120): n = A,T,C or G
caatgtcctttaaaaccaagcagtngctggattttgatnagacatggaacantactcctaactacaatcaangctgttgttattgntngaatatgtggagcgagcaacatggaatgaccg

SEQ ID NO: 99 - DNA, 233 bp, Mus musculus
  misc_feature (1)...(233): n = A,T,C or G
gacgagagcctcctgatnanatcctactgnttgagagcattcatactcccacnggctccangnacgnnntnatcgccntactacgaaggnganctgcncttcccatgnggtgcatggngantaaccttgacctatgacatcaggtcttctcctcttgtgtgtctctcgtccttctgatctctgacaaggacatgggtcattgaattaagacgctacactaatcagtgatctat

SEQ ID NO: 100 - DNA, 123 bp, Mus musculus
  misc_feature (1)...(123): n = A,T,C or G
acaggcaatctaccatagagcatncaactatcctaagatgcattcnnccaaccaaccaaagaagcaanngactganctgaggaacaaccaaccaaccaattaaccaaccaactgaccgaccaa

SEQ ID NO: 101 - DNA, 417 bp, Mus musculus
  misc_feature (1)...(417): n = A,T,C or G
ctccttccgaagacaatctgtactctggnatcatctggtggcatgcanntgaccaaaacttccatacncagcttgntcttatgaangtagtgcatcctgnacaccatcgcaccatactgganacttgatccccangaaancccctgttcacggcctggatcagaanagaaaagaacaagctgangatcntgagtaacacagagttgaataaatgatgttgtatcaacaaggnggcctgnannaagggtncnggtggnggtncccactanngcctgcggatagcancccacctgcacaacagggaacctggacagggtggggaaggcncaagttnncacagcagngctcangccctcatggctggggggctgncaccaagagctggntggaagggacccanaggctgaggggaagggg

SEQ ID NO: 102 - DNA, 140 bp, Mus musculus
  misc_feature (1)...(140): n = A,T,C or G
gagactgaggtttaacaggaaganaccatgggcaggctcctcaaagctagtgagtggtangcnattcntctcctgntgnaatgtgtcacttcaaaccagatnanaatatattaanggcaggtctgttgccaaaaaaaaaa

SEQ ID NO: 103 - DNA, 237 bp, Mus musculus
  misc_feature (1)...(237): n = A,T,C or G
gagactgaggaaggtnccgtcggcacaccagccagctcgngaggacttannatgattctccattactgacngaataaaatgaagtccccatctctcttcaaaacagngaagcngnacctacttctctgagtacacngactgagactattttcatgantaaagaaaancattnaccaggtctnaataaatggaggggcaacnatangctttgggccttgatcagaacacaaaagatta

SEQ ID NO: 104 - DNA, 262 bp, Mus musculus
  misc_feature (1)...(262): n = A,T,C or G
tacaggggttccagganagccaganaaaccctgncttggaanacanacaancatcatcagagaacagnnnannagncgctgtgtcngntatcatgggcacctgagatttgctgcttgtcccctgataaaggtctgaaacatgggatttacagtggngtcagtttgcatggactgagcaagcctagccaaccagtatgtgtccttttatatttctgantatttgtaaagtttttaagncatgtaaatctatattttaatctca

SEQ ID NO: 105 - DNA, 216 bp, Mus musculus
  misc_feature (1)...(216): n = A,T,C or G
tttttctttttttttntgttgagctgctccacaccaagctgtctgtttttatggagtgcctggagggcgactgcctctgcgtgggctgctcttaggcctgctcagctggccccanagacaagggtggactcactcagggctcccccttccagagggagggcgtgacttctggggcctggccccactcttaaccttggctctagactgttactccca

SEQ ID NO: 106 - DNA, 355 bp, Mus musculus
  misc_feature (1)...(355): n = A,T,C or G
tttccaggtgcttttctgatgccaaattgaaatccaagatgaggtctagaggtgtgataaagcagcagccaacgaaaccgtgggagaaccatactggaggtctgagatgcgcaattcagtctactgctaacggaagaaaagagcagggtggaccgattaagctgtgcagcacatacagagaanaaaggctggctgtgttccgaggaaccttattatctcaataaactctgtaactttcagaggttctaaatcatacggttgattctgccaatctcctagcacaacacaatgtgtcaggaagaattggtctcatttgccaaggaccatccaatgaagactgggagaatccactgta

SEQ ID NO: 107 - DNA, 426 bp, Mus musculus
  misc_feature (1)...(426): n = A,T,C or G
gagaccttacatcacactggagtgtgatgatccgggaggatgattgcctgagacctggaaccttacgacttgacattgaggcgtacagcatcgccccccagtccaactgttcctcctcccaggtccagctcagcgtgctgacttccttatgaggtcctcccagaccccaactgtgagccaagccggatgacagtgccactcaatgtgtgagactgcatgaccaacacttgacaagaaacacccccatccagcttgccaggcctgtcacatcgcatcctcagtcaggaagaagacagaaaggggctggtgtttgccttgttttctcctttttatttggnctcgntcctgncccttgggtggtgctgatagcattcaggctgngccagttctccccagtaaaaccttcttttgagatgccccaacaga

SEQ ID NO: 108 - DNA, 434 bp, Mus musculus
ctgagatgaacccccaaagaagaacaaaggtgaccccatgaacaacctggaacatttttaccgcgagactataatgaaaaagccgtcttgaagagttccaacttttgagaggtgaatcctttgcttgccactcactggtctcagctgcatccgtgagtggtagtggcacagctgagaagccatcactcctccagcacaagggaaaacaggcagcacagggtaaaggccccaggctccatgtggcaaagcttattgattttccaactgagcaatattggattgggcctaagacgctgaagcaaccaatagaatttatcccagaagatgagatccagagaaatcgtttgtcagaggaggagatccgaaacattcctatgttttcttcatataatccaggggaaccaaacaaggtataggccacatcaaaaaaaaaa

SEQ ID NO: 109 - DNA, 161 bp, Mus musculus
  misc_feature (1)...(161): n = A,T,C or G
gagactgaggaggcctcantgctcccntagctccccactgggctnnactgnacngccatnaggacccatgaatntcctgcctcaacctcngaactggatnataggggctcactgctgcacctgactttttcacatgactgcttgggaatcgaacccaaaaa

SEQ ID NO: 110 - DNA, 153 bp, Mus musculus
  misc_feature (1)...(153): n = A,T,C or G
gagactgagcagcttgcaccgcncagctgtgctggtgaactgtctgttcananaaggatgcgttttgannaccaatggantttacctgtggaaccaancatctgcancantgtntnntncggaagtccacangattgattctgctcaaacaga

SEQ ID NO: 111 - DNA, 154 bp, Mus musculus
  misc_feature (1)...(154): n = A,T,C or G
gagactgagggttggcccaggncctcctatgacctcaatttccacagaagacaaggcagccactctgggtttcgtagggcggaaccattgagccttcttggagtaaagcgtcggaaacacaaacaccccagcaccgagcacggaaaaaaaaaaa

SEQ ID NO: 112 - DNA, 283 bp, Mus musculus
aactgagagctgccagagaaggatcaggaagttcaaggtcatcctgcgatacagagattctgagaacatcccgggctagaagacattctgtttcaaaatcatgaatttcctttttaaatcactctgcctgtgcaaaccaggatgatcttgaatttctgatcctccaatctcagactctgtactcaggggatgtactaccatacctggcattagtatttctctttatcctgatccaattttcccaatgctacctattaaactgttcaatccccaaaaaaaaaaa

SEQ ID NO: 113 - DNA, 376 bp, Mus musculus
  misc_feature (1)...(376): n = A,T,C or G
cctggggttggccttccagggcgctatcaagtactttcccntncaagtccctacggcagctggagatgtgangaagaccaanctnnatgngcttncctcctctgtcctgngngacaccacagccctctacacctgtctgctgtgtattacagtcacaccaagctgtgtntcggntaatagtctgtctccctatggnctgcatatggaccccgtnntctgctctttagggacagagccttgagctttcttcagagctgcggagtctccaggagctcttgtcagcctgtggtggggatctctgctctgccctcccctggctagccttgctttctgccgacttcagctacaatgcgctcaggagcttagaaaaaaaaaa

SEQ ID NO: 114 - DNA, 158 bp, Mus musculus
agggtctactgtgtagccctgtctggtcagaacttgctgtatagacaaggataaccttgaactcacagagctccatctgcctgttggtatttaaggcatgtgccactatgcctggatgtatctcagcattactatggtgtcacactcaaaaaaaaaaa

SEQ ID NO: 115 - DNA, 169 bp, Mus musculus
  misc_feature (1)...(169): n = A,T,C or G
ctctgtggccatcatggaggtggtggaggtggagagtcccctaaatcccagctgtatgattttgactcttnagaccttccatnnantngntgggttngtncatcangtacntngncgtacattganattcctcatgntcccatngctgcangtcttgccaccagtgaat

SEQ ID NO: 116 - DNA, 258 bp, Mus musculus
  misc_feature (1)...(258): n = A,T,C or G
gaagatggcatttgcattcattgnntcnttctntgtatatcatttgcagcaacatgtatgaggnacttcctgagtacngagcactctgcngaactctgnngacagaagactttnggaatgnnaaatcccatgaggtcccctcctccanagacaagcaatgaagctaggatctagatttcttnacgatnggtctgtnccaacattgnctgngaatngantgnttttctgnnctgggatngtgggtataactgatagcat

SEQ ID NO: 117 - DNA, 225 bp, Mus musculus
gactgaggtcgagctgaaccccaatctgtcatttgaagaagcctgcaaacagactggactccatcagcagcacttacggcgggctgggaaggtaggggtgggggacagtgcaaagactccatcctcccatttatgggtatattcatcctgagctttgcagcagctcatttgtaacctgctcactttcgggctagtaaagctccctgcccacctcaaaaaaaaaaa

SEQ ID NO: 118 - DNA, 367 bp, Mus musculus
aactgaggtttgttgcgattcatccaagatgatgcacaagaaagctcctttgggatctgtatgtcacactatcaatacaacgcttacattaatcacttccagttaagggccaagaccagcgacatccatttgaaggccagcactgccccctggtggaaatagcgggcaggggcaagtatagccaccaactgatggtcaaagaacgtatttatttaaacatgtgcttcttatgaggagtttttattgtgtggataccattatattattaactgggaaataatgttcacaaattatatatttcatataatgtattgtcttgaaatatgtatatttgtgaaatgactaaattaaactgacatatcacata

SEQ ID NO: 119 - DNA, 440 bp, Mus musculus
  misc_feature (1)...(440): n = A,T,C or G
actgaggatgtccgtggattggacttgcctcagactgtgtagccgtggttggccttaaattcttggtcctctgcctccacctggtcaaatgatggctggccttcaactctggatcctactgctccagcctcctgggactgagactacaaccctatgccaggcctgctggaatcaagtttttctcagggggaaattatacatactctgattgggaaaagtcatcacatttagaattgagcacgttcttgagctcatataatgtgttcaaaacaatggcagaggtctaggggagatggctcagttggatagaagccagcctgaagtcataagttagattcccacaaccctcatcatggaaggagaagtcccaacccctgtgctgtggcatcccctcccacgcacatctacataaatgagcangtgtaatgataaaaaaaaaa

SEQ ID NO: 120 - DNA, 285 bp, Mus musculus
  misc_feature (1)...(285): n = A,T,C or G
gactgaggaatatcacagcccatctggaagatccatcagttctaacggggctgggcctgcctccaggatgtgggagattggctccagagctgacacagggctgcttccccccccccgcccccccaggatggagctntggagggaaattctgaattgttttnttttggggacagtcaggtgggggtgggganaggaanattgnnccatttatcttntatagacatttnnttttntcccagcantggggagccacatnacccaaatntccaattatgaacaccacag

SEQ ID NO: 121 - DNA, 376 bp, Mus musculus
  misc_feature (1)...(376): n = A,T,C or G
atccagtgaagcgtgggcngctngggangtaactgagaggtagagtgcctgtgagcatgtgtgaagccctgggttccatnatnagcatnaccacantacgtaaacacatgaggacactggacacacaggacggaaggctcangaactgaatctccagatnttcagcccttctccctcctcctggaatgtgtttaaacanaatcacttattttccaaatttccttagtgtagtaccaatcccacctcccttaaaacagctctcatatgtgatcatgtctaagaaaactttgaaattataatgtattttgtagccattgtattataagtgtataaatagaaaattcagtctcctgacttgtcattgcaaaaaaaaaaa

SEQ ID NO: 122 - DNA, 124 bp, Mus musculus
  misc_feature (1)...(124): n = A,T,C or G
tcggagatgctgcagncgcctcttatgggactcggggaggaagatgaggcggaccttacagattggaacttgcctttggcttttatgaagaaaagacattgtgagaaaatcaaaggctccaaat

SEQ ID NO: 123 - DNA, 208 bp, Mus musculus
  misc_feature (1)...(208): n = A,T,C or G
ggaaacagctacaaaccactggaanaggctgctgcatcancccntgcannanantactcagnaatagagganangagcatcatntgcccctgnngaacnctgnttggatncaaacnagagtatcctgtgtcccacacccatctcgntgcgctgnatcattgcttttgtaaaaacacgtatagaataaagataaaaataacttacaaaa

SEQ ID NO: 124 - DNA, 213 bp, Mus musculus
  misc_feature (1)...(213): n = A,T,C or G
tgagggacaggaacgcatggagatctgctacaaccacaacagaaagcaaatggatgtgggtcctgcctggaggagatttcaaggagaaactagaagcatgcctggcaggatggggaatgggccggatgattccggaagaaggaaaagactanaggagactcttcatggtttgcatttcattaaaaacctccagtttggagagaaacatgcaaa

SEQ ID NO: 125 - DNA, 186 bp, Mus musculus
  misc_feature (1)...(186): n = A,T,C or G
aagtggtgagcgaggtggngngccacgccaaggaggttgnacagaagaccattaatgaggnccnaggganagcccaaaaatcactganacaggngaggngaangaggtcacatgagaangacacccacaccatcactgatgctantnacccatgccggcaanaangnctggagaaaactcggcaca

SEQ ID NO: 126 - DNA, 191 bp, Mus musculus
  misc_feature (1)...(191): n = A,T,C or G
tgaggaggaagaggcagaaaggccaaagtttaaggccaccctctacaatcaaatctgaggccagactgggatataatataccacancaaaagaaatactaaagaataaaacacantgaagtngcctgcagtcacagaaatttccaaacactttttctttataattaaattgtgcacttgtatctaaaaaaa

SEQ ID NO: 127 - DNA, 179 bp, Mus musculus
  misc_feature (1)...(179): n = A,T,C or G
ctgttcctgcacacctgntgcngcacacctgctnccgcacacctgttcctgcacacctgctgctgcacacctctngtgctgcacacctgntcctgcacacctgntgttgccaattgacttttttggttgtttaagcnnnntntttctttctttctttctttttttgtgatgagggtagg

SEQ ID NO: 128 - DNA, 251 bp, Mus musculus
  misc_feature (1)...(251): n = A,T,C or G
gtgcccaggaaggaggctanggngacaaagnggacttaactgggatccggagcccttcagggacacaagctgaataacacagtcaacacccagggatctacacttcgtaatttcccctcaacattgccacgtggatcggtcctcagggaagccttccctctggcaggtgctccctactgtgtctgtctgtctcctggcttttagggacagtggcagtgaccatggttctcctacttctccaaaaaaaaaaa

SEQ ID NO: 129 - DNA, 313 bp, Mus musculus
  misc_feature (1)...(313): n = A,T,C or G
gtgaaagagcattaagacagacccttgaatacgtgatcctggcctatnaagatnacaggaggagaggagctgactaactgcttatctancaactgtanagtgcttgcacaatgganggaangattacacnctgaaanaactgcgtggggtcttgatgctatgaaatgattggnttgngaaacgcantctttgttgtaaccccatangagctgncccaattctgnactcgtggtccgtggtcctctacccctgcgtggagtactgggccccagagcacgcctggaataaaaagtcctcttgcggtttgcaaaac

SEQ ID NO: 130 - DNA, 167 bp, Mus musculus
actgaggcaatattcaactacctgagctacatcgccagcaacacatcttgtttcaggttccagcgacttccattgcaaagcaaatctgtcgttcctgtgttacccattcagtttgacagactctgtttggaaacaaaaaaactatattcaattccataaaaaaaaaa

SEQ ID NO: 131 - DNA, 250 bp, Mus musculus
gactgaggatgtgatctccgaaaacagaattttatgctaagattggctattgtctccaaaatacctagaatggaggtatgaaaacacagcaggtactcagccaggatctgctgaaggaatgaggaagaagacaagagagcaggtagccatgacaaccttcaagaacaagttgagaggatcggtaatcctgtgtaccaacacatctaagatgctactgttaataaagaagcgagtcacgtaaaaaaaaaaa

SEQ ID NO: 132 - DNA, 232 bp, Mus musculus
  misc_feature (1)...(232): n = A,T,C or G
gactgaggtgtttgcctgcnatcttcctgtacaccatttgtgntcctagtgctcatggaggccanaagaagacattgcgatctcctggaattgaagttacagatgctgtaactggtgtggtaatgtgtgggttctgggatttgaacccagctcctctggaggagcagntcatatgcttaaccaccaacctatctccgtanngttctattttaaaaaagattcatttattttt

SEQ ID NO: 133 - DNA, 340 bp, Mus musculus
  misc_feature (1)...(340): n = A,T,C or G
actgaggtctgacagatgatcctgggccagaggctgaagactgatgctccagcttcctgacttactggggctgtataggaggggttgtctggaatgaggaatgagtcacatactcaggtaacntcttnagaacctcccatctcacccccaaatgaataaagggaccaatcactgggcaagtagggnaaacttctgggttgntcagaggaagaaaggaagcagaananagttgggggctttttggatggggataatganagggccagatgncnctactagagncncctggcttanatgacanatacaccaggattccnccactggaggatttaaaattaat

SEQ ID NO: 134 - DNA, 509 bp, Mus musculus
  misc_feature (1)...(509): n = A,T,C or G
actgaggagagaagtggagacagagcactcttcttcgtggtttcgtctcaagatacagtgcagctcagctccaggccctttcaatggccccagagcactctgaaagactcttntactatgtgcggncnanattactagatcnagaggtcagaccanaagggganggtattgggcntatgccnacagacttcacattngngaacagcnagggacagctnntacaatctctctgaagagatctcagtaggactgaacccactggtccaggacacactgntcgttagcgtaccggaacaagagattaccgtactagggncggnaagaaggaaanattcttnacatctganctttccagatgnggcnanagnttggcttctcttctctggcagntggcctgcctgccaggatgcctgcccctgtgagcccccatcctntggcagctncagcccatgggaattcatcacctctgctggggacagnagnttntgcccttctgccatatataacag

SEQ ID NO: 135 - DNA, 219 bp, Mus musculus
  misc_feature (1)...(219): n = A,T,C or G
taccagaactcatcaagtgttgnngcctctgcatctgcccttgtnntngggccnggnacnggacaancttncactcntacacctacgngggntgaggnacttnagtgctcccagccagcactncctgcccagcataagctttaaccttttagtgaggagtatttngcccttgggacatgctnaggaaaaataaagtatgccattatttaaaaaaaaaaa

SEQ ID NO: 136 - DNA, 346 bp, Mus musculus
  misc_feature (1)...(346): n = A,T,C or G
agacaatgtcccaggcctgagtcatggattcagacactgaggccatccaggtggtggacgaggaaggactgaggcgccactgtccagggagtggaccaggaaggaccaaggcgaacaacgctgagctcttgactcatccctacttcttctatctctctatcccattattctttttttctttccatttttttgggggttccatgctgggaatcaaagntnngtccactgcaagataaacaagtgttctctcctgcccatttctttcatttgtttggaacaaagcctcattgatatagnccaggctggtcttgaactattatgaattattaaaactctagcctcgcta

SEQ ID NO: 137 - DNA, 156 bp, Mus musculus
  misc_feature (1)...(156): n = A,T,C or G
agaccgttgtttaagtgcnnacagagaaggcacagggganaaacgttaatcncagttgagcnactntacatctgtgcctgcggggnctaatggaatatcagnaggtaaccaatgntgtncgaatcagtcatcgtaatggncaagaagaaacacccg

SEQ ID NO: 138 - DNA, 113 bp, Mus musculus
  misc_feature (1)...(113): n = A,T,C or G
gtaaatatttattaaaatntgtaaganaaacacattttttttngagcgnggtaccccagccctccttttnttaccttcttnttggggctggaaagtgatgttgcagcagggaa

SEQ ID NO: 139 - DNA, 204 bp, Mus musculus
  misc_feature (1)...(204): n = A,T,C or G
actgagggactcactatttagccttggctgcctgaaactcaccatgtaaactaaactggccttgggatcacagatactcagctgcgttctgcctcccaagcgctgggattgtagacctgngccacacccgnagactttttttttntttgaaaagttnanacaagnntacaataaactntaatcttatacgcttaaaaaaaaaaa

SEQ ID NO: 140 - DNA, 184 bp, Mus musculus
aactgaggaagcaggtgtgcaacatgccttgcccttaagtggaacatctaaaattagtcctgctacaatcagtggctgggaacaaagtttcagccgtgtcttgcatgtgttaagcagatactgcaaagttagaagaaactgccaagcaataaaattcatataaacctggtcaggaaaaaaaaaa

SEQ ID NO: 141 - DNA, 196 bp, Mus musculus
  misc_feature (1)...(196): n = A,T,C or G
aggtaacaagaaatacaaaaaatgctatncacgcangagaccattctgtgctgcccaaaagtntctcanatggaaactncagnaagaccatctcctcaggcttncatggncacacctctgggngntgantatcctctgcntgntgnacnttntttgaccttcacttgctgngngaattataaacttactcattcaa

SEQ ID NO: 142 - DNA, 399 bp, Mus musculus
  misc_feature (1)...(399): n = A,T,C or G
gtttgtgctgatgtagcagcctgagnagaggccatnattacttnttgnggaactntcaaatgngcncacaggnagcatggntgantccatatatgnntatcccctaaccccaccccttactgtanagtctgnaaaccaatagacacggntccagaggctgagacgcggcaatnccaatctggagctgaagacccggaggattnctgnagagcggctgttctnagaggggggcntanganataacctcctatacccttanangggtggatcnntgagcngatccagagncatgagcatnaagangaaacatnaagtctccaggtgccttgcccctattctttccaatcccatgcctnagttgnggggaccgatggggaagctgagttaagcttggaacag

SEQ ID NO: 143 - DNA, 146 bp, Mus musculus
  misc_feature (1)...(146): n = A,T,C or G
ggccctcctgacccaagagaaggagcgttggagaaaacaaacacccccccactagcagaatcctctttggcaagcttaaacagcacatgacagtttagtagtataacngcttacttcaagaacataagcaacctcaaaaaaaaaaa

SEQ ID NO: 144 - DNA, 298 bp, Mus musculus
  misc_feature (1)...(298): n = A,T,C or G
cgaatgggtgaaaattgagtgctttcaaccatcatattatctaccttgaaggatacttagtggctgtgtnggcctgagttgccttggagaactgactcaccattgtattagaatctgcctanccatccagcagtccttaagaaagaagagcctcagagactaggacaggaaaagacacaggggcaacataatggcctcaacaggtctgantttntatacngggngnagaccacttgccctgtctgccaagagcttttgaccaaagccctgagtctaggctgtggccaccgtgtatgcc

SEQ ID NO: 145 - DNA, 122 bp, Mus musculus
  misc_feature (1)...(122): n = A,T,C or G
tgagtgtttggaccactcaatgatgantgacaaggagctcttcctaaaatgaaacaagcatcaaaggacaagaaaggagccgtgatggtggaataaacctcttaaaaatgaaaataaaaaaa

SEQ ID NO: 146 - DNA, 194 bp, Mus musculus
  misc_feature (1)...(194): n = A,T,C or G
aactgagggtctgaagtncctgggcctagccttgacaccagnacatggaagataaagactctgaagtcccagntctccttcctcacctnatgctaggatcatgggctttgtctatgcatatgactgtaaaaacagactaagctaggtgtagtagttcaggcctgtgataaaaatgagcaacaacaagaaaaaaa

SEQ ID NO: 147 - DNA, 293 bp, Mus musculus
  misc_feature (1)...(293): n = A,T,C or G
acctcttcttgatggnctatgtggggaggacgngagccagtganaanggaccacatngaanactctcnaggacacgataacagggatgacantcacatcgcccttgcatcacgcaaganactgnnggnatgtcaaggaatgaacagactgtctgggtgactgngacgcacactagatacaaagggnctgnnnngctgaactnnnacagtccatgcccatgtcccagttctgaaagtcatgaggnngatatncttgagcttattagaaaggcattgtctcaaaccatatacaaa

SEQ ID NO: 148 - DNA, 360 bp, Mus musculus
  misc_feature (1)...(360): n = A,T,C or G
acacagccaagattcatgcctgcgtgnatactggaacctaaccactgcgttctactgctgtgctggagagttgccttggattacacaaaaaacaaaccttttaacctctcaccaaatgagcaaacggtatgctcgaactgacttgagaggaagcagcagcgctttttaagcgtgngctncagacgtctctgcggcacgngggtaggtntacccctggccaacagagcactgntctgaccaggaagccagccgcacactgtaaatctggttaaaagcccgccagtgcaccccctntctacactcagaccacactagtcattcactngcangaaacagggcaatnccaagaggtccccataa

SEQ ID NO: 149 - DNA, 273 bp, Mus musculus
tgagagctggactggccattatggaggaagaggtacagcagcactcacactgtatgaactgtgtcagtagacggtgtatgaccagaccagagcctggggtttcctgtgacttgattggctgtccattggtttgtggagcagttttccattcttgtaaagctgacgaacatcggctcttgtgtccctttgaacgagtagcttgcttaaatagaaactttggatgtccatttaccctggcacgaaataaagttgctgaacatctaaaaaaaaaaa

SEQ ID NO: 150 - DNA, 113 bp, Mus musculus
  misc_feature (1)...(113): n = A,T,C or G
accatggcacccagtgcgcaggcngcttctttgcntnnnaggcctaggngactatggtcgttaactcccntgccaaccacaaggagcatntatggcatacgaggtattttttt

SEQ ID NO: 151 - DNA, 349 bp, Mus musculus
  misc_feature (1)...(349): n = A,T,C or G
agtggctcattgattcanctgtctgcaggggcatcagaatgnggccaggggaagcaaaaggccacaagctgcaaggttcctggtgtgtnacactctgtggnannggcaanngctcagggaccaaaacctggtcaggatcacttnctcccagaagnacctgtgagtatanngctacgancattggaantctnnatccctnaggnncactnctgtgaagcantaccacaggcacagagagcttcctctgctttgctcgtttgtgtccccacancagcacctgctccacaggagatgctcaatacatactccatggattttcaagggcacccanttctaggattacagacca

SEQ ID NO: 152 - DNA, 143 bp, Mus musculus
  misc_feature (1)...(143): n = A,T,C or G
cctggcagattctgaacnnanctcgaaagcaacaagaggcaggagtggtggagnantgcctttctaaaaactgagactgtggccnatngagacctancctggttttnccttagacantgagtgangtgttttttttgaaataa

SEQ ID NO: 153 - DNA, 175 bp, Mus musculus
  misc_feature (1)...(175): n = A,T,C or G
acatctgaactgaacatgttgcggctgntctcanacccactgccacctcctgttctagcgntnangggggtccacantnncttcctaattctggcttctgagttctgtgctctttggcgtggaacttcgtacatagctnacnnaatttctgcttctctgcctccacttcccaaga

SEQ ID NO: 154 - DNA, 188 bp, Mus musculus
ctttgagactcctccagcacccgtacctgatccgcaggattgaagagcttaacaagacaaccaaccaaaaataatgaacttaaaacaaaaatataattattcattatttctacacagcattcaactgcgaccaatgacatgaaaaatcatcgttgtaattcaactacagaaacacctaaaaaaaaaaa

SEQ ID NO: 155 - DNA, 171 bp, Mus musculus
  misc_feature (1)...(171): n = A,T,C or G
ttgctttcgagcgctggagattgaatttcagccagctcgaccaagaccacgaagtcttacttacagccgcagaaagaaatccggatatagcagctctcagctactgttccagcatcatgcatgatgtcatgatcctgancataataataatggacttaatccctgaaactg

SEQ ID NO: 156 - DNA, 274 bp, Mus musculus
  misc_feature (1)...(274): n = A,T,C or G
actgaggtcctgcgtggatattggcagtgtgngcagaaaaatgcccaccatagcttcctcacccatctatgcatggcctctgttctcccctataaagactgcatcttctgaattagctttgacctgtctccttggaccaactgattaccgtagaccctgcctcctccgtttgcatttatgtaataacttggctccatgttcagctgtatgcacgaatcctgtctntctgtttagngctgnataataaacatacttgtacttccaaaaaaaaaaa

SEQ ID NO: 157 - DNA, 233 bp, Mus musculus
  misc_feature (1)...(233): n = A,T,C or G
tgtggctgcctagcacacccgngaatgctctctntgatcncncactagatgactntganactcgancntgancagnatcactgaagctctgatctatacctatggnatggganccgctacactgtggactctacccataanggntgaccctatggcttactcactcacccactcnnttgcngtgggaccttggaaagccnntgagctgagctantctctctcccataaaatgg

SEQ ID NO: 158 - DNA, 147 bp, Mus musculus
  misc_feature (1)...(147): n = A,T,C or G
agaaattgatagcatgctcaaaacttgccggacnngctgtganttcatnannaaacncacannnttgncctctcgcaccgtgaggcagaacatggctgaactacctggaccacaccctaagccaatctaataaatcctcctttaata

SEQ ID NO: 159 - DNA, 374 bp, Mus musculus
  misc_feature (1)...(374): n = A,T,C or G
cttgcggaactctcatagggnggacaggaatcannaactgncaaaaaaaaggttngccnnggnccccaaannnanacacctctntncacngggaactgcncgagtggaagaaaaataaacaaggaagaaccgttccagagctatggaggcaaagtgtggacagaggacagcggtntgtggggagctcanacaccaagggcaaatggacagaggcacactggagccactgggtacagtgctgtcagaggactgccacagttagtctgatggtttctaggacagcagctcccccttctgtggagtgatcacagcacataaggccagactgcttactgaggngagactagacgccaagagaaagcaagcatgggtta

SEQ ID NO: 160 - DNA, 141 bp, Mus musculus
  misc_feature (1)...(141): n = A,T,C or G
agcctacccctcctggtgnactgagcccctcccagcaggcangtgatctggtcggctatggcnnnggagcattcctgnagccagccacaggcntccctganacagntnaatntagctnggcagtaaactgactcctttccg

SEQ ID NO: 161 - DNA, 402 bp, Mus musculus
  misc_feature (1)...(402): n = A,T,C or G
gcatatgaagaaaaccaagcangcctggcctggaatgatccttctgaagcccacggaaaaaagagcaaatgaaagtagtgngtgcagnggtggaggatgtnctgcagcctgcntgtgaggagcctgaggtacttcaatgctgnccaactctgcaagangccctgagggagaaacacttttgcctgtnccctcagnaggacctggatgctagcgaatantgggccatgcggactggagaggcagataccagcccagctcagaagtacgctacacaagagtgtccaatggtagcttgaggttttctagaacctgcttgnggcctggcaattactcatggcttnggagtattcctctgatttaaagcagaataaagagagtattgcnagcatcgaaaaaaaaaaa

SEQ ID NO: 162 - DNA, 164 bp, Mus musculus
  misc_feature (1)...(164): n = A,T,C or G
gactgagggaatttaagcagttttggcctagtcatcggggcctgaagaggaggcacagcggccccgagaatcactggncnctgctcctntatgctgctgctggccgtcccantccgatncaggatgnntgnggtatgaatnattcacagggcctggaatacttt

SEQ ID NO: 163 - DNA, 428 bp, Mus musculus
  misc_feature (1)...(428): n = A,T,C or G
tgtgtagtctccttcagagctgctgcccgagtggaaatgctctcagtggagaatggcctggaccctcgngntggcnngcaggtcatcaagaagaagctcgtgggatccgtgaaggctctgcanaaacagcatgttgtctctggacacagtggtcaccantgaagatgganatgccaacaccatgttgcagtgccctggaggnctgtgttcatccactntttttttatgcnggggggnatccacaccgaggcttggcngggaaaaaggaaagaancacacctccaccaagaaggctcttgccttcnccctcgtcttcttgagcccccttctgaaagccatcacccancagacncatntntctcagattnggnagcncctggtnttgatcaaacaccagatgttagggccgntncccgaacctggctgcg

SEQ ID NO: 164 - DNA, 118 bp, Mus musculus
  misc_feature (1)...(118): n = A,T,C or G
acccggagatcagaagttcctattcggangttgctattctntaccaaagtataggaacttctcgacctgcaggcatgcaagctgggggggtcganttngaggaaggggggaaaaaaaa

SEQ ID NO: 165 - DNA, 186 bp, Mus musculus
  misc_feature (1)...(186): n = A,T,C or G
cgcatcacattacctggtctacatttaacacangntgcatgaatggctgctgnctgggctttcnttgnctacatctactcaagagaatacaangggnaccaggnngatgggggggccnanatgactggncgcccaagcccatgctttatttntncangngggngaaacatacttcctctgggcatc

SEQ ID NO: 166 - DNA, 178 bp, Mus musculus
  misc_feature (1)...(178): n = A,T,C or G
cagtggacatgaaccctcaagagctgcttgcttacgcccatgaccacaacngtagcncgacagnaattgctgntttncctaagcagataattacatntgtttcaggactctagaaacaaanttctaantgggcattataactaggcataatcttccaataaaggtatgaaattcatct

SEQ ID NO: 167 - DNA, 300 bp, Mus musculus
  misc_feature (1)...(300): n = A,T,C or G
tgaggtggggaattctggaggcgcactcagtgcgaaangctnngaagcaaaagcntnttaccaggatccncccgaccntgnggaggnaatctttcctaaccagattgganatagttcactntcacataaangnctccctctcttcattttgtgtatgatgggttaactngtttttcaggggagttgtgattactgattaatttnagaannttaaantgacagactgtntanagattnnggganganttaatgtanagntgttaacacagaaaaataaagttgnttattacattgtttcaa

SEQ ID NO: 168 - DNA, 357 bp, Mus musculus
  misc_feature (1)...(357): n = A,T,C or G
ggctggacagagtgcctgctaggtctatgaagctagaagcctctgcagtctcaggatggccgtcgaaagcctggaggatttctggaagcctctgggcttcagtccatattggacaaccaaagaaagtaggtcgtgaaatcagcaaaggtatgcagccgcagtgacggtaatggcggctgcaaccacagcagagcagctgaacatgccagcaagatgcanagtnnacgaagcagcnagagaaggtcttctctcagatccccctttatcggggttgctgtcggaaggttctgcccatccttagggtgtatcttcccacttcagttaataaaagcaaatcctccactcacaaaaaaaaaa

SEQ ID NO: 169 - DNA, 170 bp, Mus musculus
  misc_feature (1)...(170): n = A,T,C or G
agaggcagaggcttgtcaatgatgcatgattcgattncgggttgatggacaaccaatngatgntnttgaccctttanccngggnnnccganggatcttttttttnaagcntgggntgntttgcttatctaggtgactccttgggcatgtnantaaacttctaggcatctt

SEQ ID NO: 170 - DNA, 102 bp, Mus musculus
  misc_feature (1)...(102): n = A,T,C or G
tcctattcagaagatcctattctctagaaagnataggaacttctcnacctgcacncangcaagctgggggggtntttntgcgagaaggagggacggctggat

SEQ ID NO: 171 - DNA, 171 bp, Mus musculus
  misc_feature (1)...(171): n = A,T,C or G
gactgaggtggggaangcacacaggccacagccgagccgatggaggaagcatcagcttanaccangcaccntgnngctttgaggngccanccgcctgnttntgntgacactgagcangcagngtggagttacccccagnccnaaagctacaaaaaaagacatggcatatag

SEQ ID NO: 172 - DNA, 281 bp, Mus musculus
  misc_feature (1)...(281): n = A,T,C or G
ccctcttgcctcagcctcctgagtgctgggcggatggacaaggttcttcatggtgttctttatgggaccccctggaatctgtaggatgcccaacaccaccctagagatacactgcctcagtgtcaacagtgtcctccacaggtaccacggcagcacccagtagtctctccaggccaatcaattccaaggcagaactgtccagctgacaagcncnctctaaggccgngagtgcaagtttggcacacccactcaaaataaagcaacatgggggttcccacgga

SEQ ID NO: 173 - DNA, 138 bp, Mus musculus
  misc_feature (1)...(138): n = A,T,C or G
accccaccacttgggggcanagaagaaaacccgncacnggggggccaantncgggaaaaggccccaaggnaaaaagntgaagaagaaatggaagggaagaaaanggtttccnagggtttgggcccgttaccttaagga

SEQ ID NO: 174 - DNA, 173 bp, Mus musculus
  misc_feature (1)...(173): n = A,T,C or G
tgacaggcctgagcangagangagtggtctcgcctgtgaacgttaagagacagagtctgnaactatgagttcctgagttcgaatcccagctnatagcactaggcagctgtgngaccttggctaagacacttaactctctgctggtgcttcttctcttcattctattatatata

SEQ ID NO: 175 - DNA, 287 bp, Mus musculus
  misc_feature (1)...(287): n = A,T,C or G
gactgagaactctcccactacactgggaagcagagactccagctatgctgcccgggtgggaactgactctctgcctgcttgtttccttgggtttccacttccgctctttctatgaagtttacaaagtctccagagagcatgangaggaacnggatcaagaatntgagctggagatggacactctattagnaggactgaagaagganccagactgattttgagnggaacttctggatggaangggggaagcggaggctggtggnggctcttnattgaccatatggctg

SEQ ID NO: 176 - DNA, 358 bp, Mus musculus
  misc_feature (1)...(358): n = A,T,C or G
tccagctctatgcagtctattccacactccgatgaagcagacgtggctgggatgacccacgcctcagaaggccaccatggcctagggaccagcatgcttgtnccacagaacccacaagggtcanaagacagcaagccancaagaaactgcantggatttgaagatgcacaggacccacagactgctgtgccctcacctttacttcccatggcttcttgcagctctcagaaaaccagctaacagaagtcggaacccttgaacgagtgtatcctgctatgtatccaatactctgttaggcaaggattcatgtatgcacttagtgagatgataaagcttggagatattagaaaaaaaggat

SEQ ID NO: 177 - DNA, 142 bp, Mus musculus
  misc_feature (1)...(142): n = A,T,C or G
ggaacccagaattcattctacagggcccagagtgtngaccctcaagaaggggtgggggtcagcttnaaaggccacttcagcttgctctnnaggtggtcttttggttgggaaanggaaangaatatcttttgtttggaaaaga

SEQ ID NO: 178 - DNA, 159 bp, Mus musculus
  misc_feature (1)...(159): n = A,T,C or G
ctgtcttcacgctaggccgttttttttttagcgnggggggnttcgttccccnagaacttacatctnctctgnccaaccagagnctcctgcntgctgctggtgcnncccnaacctggacggatgccccanacatacccaaccccctacaaggcaaggctg

SEQ ID NO: 179 - DNA, 124 bp, Mus musculus
  misc_feature (1)...(124): n = A,T,C or G
tcgggggggagctttctgcngattcgcnntaccacgcccanngctgcanacctgaagagccacacacgtgcanactttntactggaccaccagattnntcgangtggaatatgggtccagctcc

SEQ ID NO: 180 - DNA, 163 bp, Mus musculus
  misc_feature (1)...(163): n = A,T,C or G
acagacctgtaccggnaggcatggaatattcctttcctgaaggctgcccggtctattaaaggctatcagtggagcctgccaaattatctagtgcccaatgttccaggttccggcttggcttctcctgatgatggatagactgtaaccttaggccaaataaact

SEQ ID NO: 181 - DNA, 129 bp, Mus musculus
  misc_feature (1)...(129): n = A,T,C or G
actgagactcatgtgcgccttccataggagctggaactggattgaanataatggngagccatcgcttggncactgagaattanncctgggtcctctgcaataacagcaagngccttttaaccccaagcc

SEQ ID NO: 182 - DNA, 166 bp, Mus musculus
  misc_feature (1)...(166): n = A,T,C or G
atattacgatgaagcccgaagtncacctcataattctgggccttgtgaacttgacggagaggtcccgttacggaatgtctgacatgaccaaattcatctgctgaccctggacactaacagcatgctaaatgacttctagctctgangaagaccttaaatgagggta

SEQ ID NO: 183 - DNA, 137 bp, Mus musculus
  misc_feature (1)...(137): n = A,T,C or G
taatgaagtgctccccactgttcaagggagaanaaattcctcctttgctgactggaccctnggggccttttcctcaaagaactccctgggaagcgtgttngccacaggaggaagcggagaaggctgaagtgctttca

SEQ ID NO: 184 - DNA, 151 bp, Mus musculus
  misc_feature (1)...(151): n = A,T,C or G
agatgcccagcacagangctcgccntgaatagttcccatgaatcgtaggcctntncgatattntgttctntgacacattctctgcataaggttatgttncnataccacccaacattncagtgaanganctatacatgaggaggaatcagga

SEQ ID NO: 185 - DNA, 170 bp, Mus musculus
  misc_feature (1)...(170): n = A,T,C or G
ccctggagggacctganctgctgctngctgccnacagcatacctgcnannatagtggaatccattntctgctntggaggatanagacttctcgccctgcangcatgcaagctgggggggtcganttnttaganggngggangactggatagaggggtggatcggaggcgg

SEQ ID NO: 186 - DNA, 263 bp, Mus musculus
tgagagtaaatgaggcacaagagtaacctgggtggaaaaagtacagaatttgactcttcacaaaatccagcagacctgatacaatcttcacactctctacttcctaccggaggcttgacgtgtcaccaagtattcccctttctccgaggcccatatagaggagctctagatctgatgcctaaccatgaggtttccttggactaaagaaacacaattataattcctctattttcattgcaccctccagctccaaaaaaaacaaa

SEQ ID NO: 187 - DNA, 110 bp, Mus musculus
  misc_feature (1)...(110): n = A,T,C or G
atggaacactgaagaagccacncanctgccctcnttgtacnggaccatanatcattngtggggtaatctgggtccctcttccccttnctttcataactggcttgacaatc

SEQ ID NO: 188 - DNA, 370 bp, Mus musculus
  misc_feature (1)...(370): n = A,T,C or G
tgaggccgccgtgctccatctactgcagcatgnggaaccagagcctctcccactggaccctggtttctgtgctgaccttgctggcctgctgccttgtntacacgctgacaggggtttatggcttcctgaccttngggcctgaagtntctgctgatatcttaatgtcctacccaggcaatgacacagccatcagtgggagggacacaggaacccttgtgaccttcntggggntctagaaaacagtcaacagcattctcatacctcagccatttttttttctgaagacaaataatattgncatgcttcatataaacctgaacgtgccaggctgtgaggngggcatctctgcaactgccaactcctaactgtg

SEQ ID NO: 189 - DNA, 112 bp, Mus musculus
  misc_feature (1)...(112): n = A,T,C or G
gactgagccttaccaacaagtatttgtcgctgttaagagactagtggatccaagaacagaaaaaaggngaaggccttgnctttnctgnnttacatattcacagtgcttaggg

SEQ ID NO: 190 - DNA, 379 bp, Mus musculus
  misc_feature (1)...(379): n = A,T,C or G
gcttcagcacagctcttcgctttcttctccctcgtgagtatacttacatttgcaatccatctcagaagctgccttgttccagaggctctccctaaggagtctgacccctgtcagcagtgtctttacataaccagcacactgagaacatttcctaaatgaacacaccaagccactcagtgaattcgtacactagatatcacatttttttcaatgtctgctattatataccgancaggaaaaggctgtgagtgctgttcagggcattcccagcctaggagcagatggtagttggagggtatctaatgtctnccagtttacctaacacagnaaagacantgtatccaaatncactcagatccctctgacgggggcgaggttt

SEQ ID NO: 191 - DNA, 472 bp, Mus musculus
  misc_feature (1)...(472): n = A,T,C or G
gagtgggtagagacaaggaatctcagaagcctctgaacatcacagaaaatgctggggctcgaggacagggtcctgtcaccaagggcagctaaccatggttgatcgctttagcaactaataggtgatccagtctctgggaaactgtttgaaaatagaaccctgctcataccatgcacaaggcaggacatgaagaacaggtgtttttgttttgntttgtttctttttttagactgcctcctttgttcaaacctcttctctgagtatccttgacgagagaggttccacagacaactctganacctntgttnagctatacttaaaggaccattnatttatacacaggtggntgnntnanggtaacaaangtatgatcagagctttccttntgagctncagggntacagagctacactgctactgtgtatcccaaaaatacctctgtattttctgactcaaactctgaagaccacgg

SEQ ID NO: 192 - DNA, 208 bp, Mus musculus
  misc_feature (1)...(208): n = A,T,C or G
tgagatgcctgaatttactgccctgcactcggcntcttcccgctccattgagacaccccagtggacactcggttgttgacatccacaacaccactggttcaaggctggagcgggtaatctccctatgaggaaaagcttcttacaactcangtggaaagtccaatgatgacatccatgtagcggggaaagactccacattgaggtctta

SEQ ID NO: 193 - DNA, 398 bp, Mus musculus
  misc_feature (1)...(398): n = A,T,C or G
actgaggaagttgctcaaaattcttcaagatcaactgaaacaaactccaccacaaaggagaaaaatgtcatcgtccccagcagtacccatccgcggttgcttttctcctccgtgaggctctcgccatctgcctttaccttctcaacagatgcagcacacaattccaatccaaagagaaacaagtctctcaccaggttctccttgcanacactgaactnggaattacnganctctccaaacgaggagcacatgaagctagagcctggnttcgtgtngnacagaaacggagctangacttgaaagcngacccagacaggctccagtcagntggaaggtgggggcttnaaatggaagcaaaggggctctggttctgcaatagaagcaacaaagaccctgga

SEQ ID NO: 194 - DNA, 152 bp, Mus musculus
  misc_feature (1)...(152): n = A,T,C or G
gactaactatagccantcttcggnagtgactgncagatatggacctggtnacatannnatnctgacctgagagagttctnnnaaatnttccggncccaggacatcgacagctggtattgctgnacacctgttanaatgttacagatgcggag

SEQ ID NO: 195 - DNA, 325 bp, Mus musculus
  misc_feature (1)...(325): n = A,T,C or G
gtgccatatggacagattnttanctgtaaatagagngtggatcttctgagaacagggactgtgacttttacgaaccccaaaaggagcctcggttggacatttgaagattcgtggaattatgctctatgaaataatttccagtgtgcaccaggtggcgtgcgccaccgatgcgtggaanaacctttgntttttgtttggggntgttctcatagatccaatgggctcatcctatgtgtatgagtttatgcctgtgcaccacatacgtgcctgctactctcagatgtcagaagagggcattaaacaccccgggactagaaaaaaaaaa

SEQ ID NO: 196 - DNA, 104 bp, Mus musculus
  misc_feature (1)...(104): n = A,T,C or G
atgggactattacttatcggccatncaatcttgagctggnaaaccttattttcctgtnntataaaatataaaataaagtcctgtatactctgcaaaaaaaaaaa

SEQ ID NO: 197 - DNA, 237 bp, Mus musculus
  misc_feature (1)...(237): n = A,T,C or G
aggctgggaaaggctagcaaaactgtgtngaatcccatggaactggaactatanacagnagtgaaccaccatgtggttagctgntaatnggacctgggncctcngnagganccatnagtgctcntagncnctganccatctctgcagncccttatctgagcctntaatncctncttccagcatccttagtggcatttatgtctaaatatgagctntcaatttcccataaaaaaaaaa

SEQ ID NO: 198 - DNA, 394 bp, Mus musculus
  misc_feature (1)...(394): n = A,T,C or G
tttactgtataatcctgaatgtccttgaactcttggaattcttgccccagtttnccaagtgccaggattacagccatgtgctaccatactcctttcttccacaccaacctgtgtggaatagaaacatagacgtgcttcctctgcagcctgttggttgtctctggagctgctgatagcagttnggtttggttnggtgctggggaatcaaacctangatntnatgcatnctaagcaagcactctacaaccaagcctgccacagccccgacctgacagcaagtgttatannaacgtacaaaataaaggttaatggctaagaaaccanantaaanagaccacttnatgngaatgacatttctgaagctactgaagggggncaccttcactccaaatgg

SEQ ID NO: 199 - DNA, 140 bp, Mus musculus
  misc_feature (1)...(140): n = A,T,C or G
gcacataaacagcttggaggaaatttcttggaagccgtggnggagtgttgggntaagaggntccntgctgtgncancattanttgggngggacaggcactcacactgtggaggaagagnngngatgaccaactgcttact

SEQ ID NO: 200 - DNA, 102 bp, Mus musculus
  misc_feature (1)...(102): n = A,T,C or G
ggacgtggagagatggctgcggccactggntnagannncttactagcctcncagagaactgctntccttntcntnactcacatgacgagccacaaccatctg

SEQ ID NO: 201 - DNA, 144 bp, Mus musculus
  misc_feature (1)...(144): n = A,T,C or G
aaaaggactccaggagtttttcnaaggacacctaccaaaagttaccgggagcaagggntgaacccccagggngggaaacactcnaagccnatccatatgggggntnggacntgntggagggcatagctggtcctttgggagcag

SEQ ID NO: 202 - DNA, 290 bp, Mus musculus
  misc_feature (1)...(290): n = A,T,C or G
gactgaggatgtaccttcatctactcttctgnagccanntgtcctgcctgatgatgntggactaagcctgtgaaactgncagcnagccccaaantanactctttccttngnnagagatgnaaataagccngnaagtgatgtcagccaagcatacnataaagaaacccataccacggntctccntgtgccttctgaggcagngtanccctgncaaccctctgatttcngntntctganactnantntggacatctggccttcagaactgngtaataaattcctattgttta

SEQ ID NO: 203 - DNA, 276 bp, Mus musculus
caagaggccctgggccggctctactgcaaggggagagaaaacaggctctgcctcgtgaggggccagcaatagggacagaacatgcgtgggacaggacacacttcagtgctgtatactggactgtgttagtattccaatgggtgtctgctatggcaggatcctagactctctggatgcgagctcgggttccgagccccatcttcaccaggatccttggtgatttctggggcccatgctctggagctctggcccctggaacttgaacccctgatcctt

SEQ ID NO: 204 - DNA, 212 bp, Mus musculus
gactgaggttgagatggattggccagttaacaatagaagccagaaagtttggagagaactcttcgctagtgggagaagggacgaatacaaattcagcattcattttggaaatagaaaggacttctgtctgaatggagaagcacattctggctggctgcaaactggacttaaaatcatgtacttaaaaagcttttaatggttaaaaaaaaaaa

SEQ ID NO: 205 - DNA, 375 bp, Mus musculus
  misc_feature (1)...(375): n = A,T,C or G
caagcccactctgcttctaccgggatnggcgtgtgccccancaggccctgcnttatccagaantgntctgcagnactggccagccctccagaagngggncctgnnctacttaagagccncggngatgctccangnaggagagtgtgnctgngacgccagatggtnatgcnnacgcggtgcgaggggaccgctttgtgatgcctgccnaacgccgnctgcccatnagccatgtactgaatgggttgaagggncngacccagcacccaggannnctnnatgtgcngaaacagtgntncaacctgcccactgagctgccccagcttctgtctgacattgagtcccatgtgccntgggcctctgagtcactggggaaga

SEQ ID NO: 206 - DNA, 199 bp, Mus musculus
  misc_feature (1)...(199): n = A,T,C or G
tgttccggatgaagaggtggccttggtccagctcctgttgcccacagggtctgcttacaactgtgngagccagcttggtgagctgggcctcgtggagttccaaaacaagntctattcaggcaccggctacaaagctcagccccttcaccttcactgtggacagagactagctacccactgcaatccctgcttctccgaa

SEQ ID NO: 207 - DNA, 237 bp, Mus musculus
  misc_feature (1)...(237): n = A,T,C or G
gacagcatctagctcantcanttcagacagtnattaagntccacaanccggngaatgaagaaactgtncacancttacagacgannaagctgangcaccgagaagctaaggnatttatccaggacctctcaacaagtcatgccaacactggggtgtgcaccttgaccccagggactccatgctgctgctctattactgtaagttgggtcttgaggcaaaatgtatattctgaagttc

SEQ ID NO: 208 - DNA, 351 bp, Mus musculus
  misc_feature (1)...(351): n = A,T,C or G
actgaggcaaagtgcaaacagcggtgcagatgttacatcaggctcctatgtaaggaaaccactgtgatcatttgtcatggcgnatggnttgccaagaaggaacacagtacaaaccattttgaagggcagctgttataaagtacatgacccntgagacnnngcgtgactcactnagacnagncaacacnnacttgacagannannaggctgncatnntnggcaagaattcantttttngataaggngggtgaatctctacagcgacgccttacncanccaaggaaacgccacnttnnttcaatagcaanaacctggcnctcnggaaaagcatgtntggaagcaactctccta

SEQ ID NO: 209 - DNA, 102 bp, Mus musculus
  misc_feature (1)...(102): n = A,T,C or G
gtactgaaaactcactgcgctccttgagaacatcctnaacactcatgccnngctagcccatcccaacgtcccactgaaggcnggccggatgctccctactct

SEQ ID NO: 210 - DNA, 144 bp, Mus musculus
agcactgagtctcagacacatacagggccaagaaccacagccttggcgatacaacagaacactcgctatccagagggtgtggacactaacccactcatgtacaggaagggttacagcttagatttaactaatgcggtaggaaga

SEQ ID NO: 211 - DNA, 297 bp, Mus musculus
  misc_feature (1)...(297): n = A,T,C or G
gagactgagcacgaacaagtagaggctgactggagacnggctcaacaattaacatggcacctgaatttgcttccaatgggaaccaaatacccatcatgtcaagtggttcagaactgcctctaaatgcagntnnagagactctgactccctcttctgaattctacaggccgcctccactcacatgagtccgcgtgcgcgcacacacacacatttgcacgnanttnnaaaatntntcttggggggggctgggcgagatggcccaaagggntaanangcattgactgcctcttctgaagg

SEQ ID NO: 212 - DNA, 214 bp, Mus musculus
  misc_feature (1)...(214): n = A,T,C or G
tgaggcatgctcccttcncactgataggnngctgaatagtcntctgaactgaatggctgccctcagtttcgtgaaagctggagcatctnangatggnatcatgaggactgggagatggcactgcagaggaacagaactgactccagagtgttgaaggataatatcatgtggaagagaaattanattattttgtatcactcctaacaaaaaaaaa

SEQ ID NO: 213 - DNA, 202 bp, Mus musculus
  misc_feature (1)...(202): n = A,T,C or G
actgagccagttgaggccagcctaagaaaancgggagcctatgtaggaagtccttggctcnctggagaccctcaaaganntctatgcccagtggttacttcttcaagactaaagaagaaaatacaagaaagtagtccacagaaaactaagaagcatgctaaaaataaatgatgggagttttcatgggtttgaaaaaaaaaaa

SEQ ID NO: 214 - DNA, 180 bp, Mus musculus
  misc_feature (1)...(180): n = A,T,C or G
ctgaactgccacaagcaaaagaattagggactganncagagtactgtaacacccacanctactnctganccttgtnattantggnatctaaatacgggngtnaaacncaaaacctggacggcnaggaaacaatccctcctaagaatgggncnncntccccatacccttgttctttctagg

SEQ ID NO: 215 - DNA, 151 bp, Mus musculus
  misc_feature (1)...(151): n = A,T,C or G
gtctactgaagaccagagcatatccanctcttntgaanngagcaagttctggattntngggactttctgtgnataggnagncattgttgganngggggggacaacaacccttaaaccattccaataaaanccctttatatatacataaaaa

SEQ ID NO: 216 - DNA, 143 bp, Mus musculus
  misc_feature (1)...(143): n = A,T,C or G
acccacgtctgagcaaggcttcttgnnatagatgtccaaggagaccatgaaccctctgatttctctggnagggggngttaccagggagctgtanatctcatngacctggattttggaaattaaactgcaagtctttggcagag

SEQ ID NO: 217 - DNA, 207 bp, Mus musculus
  misc_feature (1)...(207): n = A,T,C or G
gaactgaggactttcccatgacagcactnnagcacctgaagtcctgngtagtcagcacagntacggagagatgagtgannacctnttcttgattccttcttccatggangancaanaccntagtnnggaacnacccagggctgaggtgtagctgagcnntaangcttcccnttttagcctgctcacgaggtcctgggttcccccccc

SEQ ID NO: 218 - DNA, 157 bp, Mus musculus
  misc_feature (1)...(157): n = A,T,C or G
gaggaggctatcccagcactgtgggagaagcacagcccccaggtgggcagnagggcatcgctgaaagtgatccccaccccctagagcctagtcactgntctgtcactatgaggagtcaccatggtcatggccacagncagtcataaaagccaatagg

SEQ ID NO: 219 - DNA, 491 bp, Mus musculus
  misc_feature (1)...(491): n = A,T,C or G
gtaatatctagtgtaccggcatctccctaagtcttcctgggctcggttcgtggcgcgaggcagcgaagaccccgtgcgtgcgctgcccctggcaggggctgcaaggaaaggatgccttcggaggcgcagaaccccaaatcccatagctgtctgcgctcgggaggaaaatagctttagctctaagtcttggaagttccttggcaagctgttggagatcagttcacactggaaggctgaagctgtgctctgagagcagcaggagatggcagtagaggttgtagactcaagcattcatgaagaggatctgtcaggaagacagcaatttttctctccggcttttcactgagaagtaatgtcaactttcaggatggcccttacctacacaggcagccttgcctcaaatgccctcatagagtctcttggtggattctaaatagtcttaaattgacaagaaagaccaacaatcaccntaaggaaaatgcaacaagtaa

SEQ ID NO: 220 - DNA, 431 bp, Mus musculus
  misc_feature (1)...(431): n = A,T,C or G
aactgagatagaatcctgaattcctgattgtcaagagtctaagaagcatatgacagccattctccaaccacacagtcaacctctcactgctttcttataaagtctacggtgtgagaagatagatnaatgaataccnacaccngggncatgatnaggtaccttggggaacaatggaaggtagaggancgtgaatagttccaagngnanaanccacccncactccgcatncattnntgctnnggcatgnaaacactgancggngatntaangacantggcccccataggcttggctntttgatcaagggggnctcagctctttgggtagggataggaagcacagncttgctagaggaagcntgncatcaggggtganctttgaggcttnaaagccatgcaccattcctactgannnctactgtagagcctgag

SEQ ID NO: 221 - DNA, 248 bp, Mus musculus
  misc_feature (1)...(248): n = A,T,C or G
gaaattttacttcgacctganatggcctnagccagcgtctaanatggnagagnccctgcacagtcttgccctgccacaaaggtcgagcctccctgncgatggngccantcacagagaagactatgctcctgtctgtccagctttttgagaatcagatggtanaccctgccctcggngtactaaccagccagcanaaaaattgtattgctataaaacaaaangcnaantaattacatgaagtaataaac

SEQ ID NO: 222 - DNA, 113 bp, Mus musculus
  misc_feature (1)...(113): n = A,T,C or G
tatctacagatgtatgagcagngcantangtgttgccgcattccgataantcttcaatggtgaaaatggtnctgaaaataaaacaggacaggatttttattgaaaaaaaaaaa

SEQ ID NO: 223 - DNA, 360 bp, Mus musculus
  misc_feature (1)...(360): n = A,T,C or G
cagaccctcagcctcanannaggtcatgggtctaaaccaagngagaacntgnagcnnantaagccaggaggaagccagatgaaaccatagnttttntnctccgnggggngtggcaaagaccgtgttttggagaaaaccttanatgcacagtcaacatcagcaaaaatncccggangggattgtgtcatactacgaagctganaatgncgaaggnaaccatncgcanagtgaagagagagcnctacnagactggccggagancancttnnaactatttcatctggaaagagaaattaagtggcccaaaaaaccctccacctttaatcnatttnctttcctgaangggagaagtaccacagc

SEQ ID NO: 224 - DNA, 250 bp, Mus musculus
  misc_feature (1)...(250): n = A,T,C or G
tcctaactgtggtcgctagccacacccggagatgtgttctgngatcnctcactacatnactttgagagtgaccttgannaagtcactgaaccnagattntatnnctctggntgggaacgcgcnnntgggtggattctacccatagagntngaccctatggnttactnacttntccactnnctngcnatgggacctttgggaggcntctgtgctgatctagnctctctcccataaaatggactaatggttg

SEQ ID NO: 225 - DNA, 215 bp, Mus musculus
  misc_feature (1)...(215): n = A,T,C or G
cttgaggcctttctagnacggaggttgccgacagcgaaggggaagcagaagtcactgccaaggacactcccaaggaagtcacaccacgtagtgtcggcatctattagacctgtgattacatgacacacagccccgtggccagtctctgtgcccagtgctgtgntcctccctgcccactgccctcatgtttcgccagtgttttcaagtcatgtttt

SEQ ID NO: 226 - DNA, 229 bp, Mus musculus
atcccagtgagccgagttctgtgacttcttaggtagttgttagctctaccgtgggaccttcctctggggagagtaaaggccacttcctcctgtctgtcactgctatttgggtttattattgtagtctcctcagacatgtgttggagccggtatttatttgttcgaaggaaagaaaatgttaaaacatttgctttgttacaaaataaaagccacattttttaggaaaaaa

SEQ ID NO: 227 - DNA, 235 bp, Mus musculus
  misc_feature (1)...(235): n = A,T,C or G
tgcggaactctcatagggnggacaggaancangnactgacaaaaaaaagnttngccccggaccccnnacncanacactctctatncaccgggaacngcccgagtggaagaaaaataaacaaggaagaacgttccagagctatggaggcaaagngtggacagaggacagctnttttttngggngngggnncaccangggcnaatggacagaggcncactggagccactgggtacag

SEQ ID NO: 228 - DNA, 108 bp, Mus musculus
  misc_feature (1)...(108): n = A,T,C or G
gactgaggtctgcttcaattcccggcagccacagngcaaggagagaactgacccnggnagttgtcctctgatccctacatgtgcatcatanncctgacatggagacca

SEQ ID NO: 229 - DNA, 251 bp, Mus musculus
  misc_feature (1)...(251): n = A,T,C or G
gactgagaggacccgtattcagttcccatcggntcacaacagccgataactccagctcctacagcctcttctggacctggngggcacttgcactggcagagcacatnccccnacacatntaacttacatatncanaacaganntngtgtngtgannacaaatttnnanntgcctatgcatcctgggggctgggatcnanggagngtgccngcatgaccanttntgaatgtttctgtatatagctcactgac

SEQ ID NO: 230 - DNA, 248 bp, Mus musculus
gactgaggttcttgctgccggcttaaatccacttcaggatgcctgtgtagactgaagacaggaagttctacaggaatcaagcacaatcccattgccaaattgggactgctgagccagccagccttgtggactcaacaactaccagatcttgggcctttacatcataagatggccattgtcggactactcacaccatatcctataagccagtctaataaatcccacatatattatgttaaaaaaaaaaa

SEQ ID NO: 231 - DNA, 149 bp, Mus musculus
  misc_feature (1)...(149): n = A,T,C or G
ttttactactgatttctcaaggcttcaaacggctcgctggggatggggtgtatcccgacgggggagccattgcttaggctgctcaagcccttngattccgtttccagcactgcanaataaaagcatgtgagtccccccaaaaaaaaaaa

SEQ ID NO: 232 - DNA, 189 bp, Mus musculus
  misc_feature (1)...(189): n = A,T,C or G
actgagtatccaaccctgactaanacactacctgntgatggnncttcccnngaanngtaaatgatgctatttatagagctacagtcaagcaaagaagcagcagcagaggaaagagggaaggaggaagaaaagaatgtatgatggaataaaggaaagaattagaaggaaaaaggaagaaatgaaaaaaaa

SEQ ID NO: 233 - DNA, 268 bp, Mus musculus
  misc_feature (1)...(268): n = A,T,C or G
tttttttttttttttttttttgtttattctanctgcccaggcnaatggnaccgntcacacaccgnccacacactctgtctacgtgcnnggncnggggnggnaanggatctcatcttcatgatgctgnacttcatcttcaaagcaagggggcttacagtaagcccnnaatngatttctacccatccctgangactcctgccccaccaagcacatcaaattgactccccccaattntttttttatgaganggggggccacccttcccatg

SEQ ID NO: 234 - DNA, 365 bp, Mus musculus
  misc_feature (1)...(365): n = A,T,C or G
gaccactgactgctatgccanaggncctgaggtcaantcccagctnncananggccnnctnacanccattccngntgnnatcctacnccnncnnacnctgatctncncatacagcnncggngcgcntttgtagngaatgatncatgcgctggggaaacacagggtagacgtgaggcctgggaaactcctgctgtgggaagtacagaagtcccttcgctgggctcaccctcctcagtctgccggcatttctggaacaaggggaagttctgctgctggctgaagccccanataattccctgctgcaaatgaagagctccatattgacccanagnccaggagaacgtgnttacaggacaaaccctgtt

SEQ ID NO: 235 - DNA, 105 bp, Mus musculus
  misc_feature (1)...(105): n = A,T,C or G
acacctactcattgtcnntagattagacgcntnctaanggacatgtaggctcnatgctntccacatacacactaaaataaaatttaccgtgctaaaaacaaaaaa

SEQ ID NO: 236 - DNA, 147 bp, Mus musculus
  misc_feature (1)...(147): n = A,T,C or G
gcctcctcctttggcggcccaacagaagccacctcagcattctgaggaatcacagctgatttcttgtgaacattggangatgnacnncagaccaattaaaattgccccctgctgacaccacaaaagactgnctcctgaggacccctg

SEQ ID NO: 237 - DNA, 240 bp, Mus musculus
  misc_feature (1)...(240): n = A,T,C or G
acttacaactgatggacagacacggctnatttnttggcagancgactggcacgcctgngtagaccnncttagnagcanttctcctgagancntnacngaagaccccttcctccanatttctttaaatcttgaaaaaaactatcatagcatgtcttcttttgtacataaaacgtctgaattccattcccttccccaaaagttcagctgttacagaataaaaggctacgaggaaaaaaaaaa

SEQ ID NO: 238 - DNA, 520 bp, Mus musculus
  misc_feature (1)...(520): n = A,T,C or G
gactgaggggaagaaaaattgaagaagaaaatatcaatgacaaaagatgacaacatagtgaaagaaaccaccaagaaacagagctggctgatggatgggatgcaggattgaaatgagcagaagtgtacangctgncnacactgcccanatgaagacatggtatttgatgaaaaggaattnctcacccatgcttggtccatcaatganaatcatagnnaagtcttnaatgaangannacagangngntgnctttcaatggnaggagatgaggaaaatgttccttgtgctgaattgcttgacttgctaacactgtacagggaaactatntgaatgatttctncanaagtgtcancagacaaatgattgnanaacancttatatgccatgccagtnatatagtattttctaattttctttaaataaagaggccaccttcctatatttaaagtaccggaatgngtggcccactcctcatacatgtaagcattttgggaagtcttaaatcaaaataagatgtctg

SEQ ID NO: 239 - DNA, 224 bp, Mus musculus
  misc_feature (1)...(224): n = A,T,C or G
gaactgaggctgctttaaaaaagaaaggtttggggaaggaagacgtttgactgacagcaattctgttcaccttcccctgagatctgctatcaatggaacctcctggtctgcccgcattatctttgcttgtgcacaatgcccactgggctgagattaggtggngtacgccctcatctcttacctatggacactcgaggatgagtgtatcatgttcagatccctgg

SEQ ID NO: 240 - DNA, 113 bp, Mus musculus
  misc_feature (1)...(113): n = A,T,C or G
agactgagggcggagagancctgcctctacccanagnctccacgtggactacagctnccagnagttccttgctgaantcaaanactacaacntcctgccgagttcccggggct

SEQ ID NO: 241 - DNA, 129 bp, Mus musculus
  misc_feature (1)...(129): n = A,T,C or G
gaactgagcctacgagtccnncatnggcgcacactgaaggcgcgccgntcntgntgnaagccnggnacnttcctaactcacaggatccatgcacaaaataaacngagatttaaccgtcaaaaaaaaaaa

SEQ ID NO: 242 - DNA, 156 bp, Mus musculus
  misc_feature (1)...(156): n = A,T,C or G
gtgacaagcccttgccgagtaaccgcnnttgcatcatcaccgtactccatncagggacgtggctatgtncatntggntcttcttggccgnggatgggcancnggttgtntagncattctgncaaaagcnatcnctctggaatgtctaggaccaata

SEQ ID NO: 243 - DNA, 140 bp, Mus musculus
  misc_feature (1)...(140): n = A,T,C or G
aggggaccacagccccaggccttctaggggggggaacaccaggnccccagcggagacccatgggatgagaatntttnnacacnacaggnnaggcnagccccacnggagggggaagggagccagccaaaacaacaggggag

SEQ ID NO: 244 - DNA, 154 bp, Mus musculus
  misc_feature (1)...(154): n = A,T,C or G
aattgattggaaatttgntgaagtgggtaggagataggctcttacnttttacgaagaatatgatatagngaacttcggcatggtnacgctananatagtngagngngncttctgtcacctgaactctttgaggacagttaaaaacatattatgc

SEQ ID NO: 245 - DNA, 217 bp, Mus musculus
  misc_feature (1)...(217): n = A,T,C or G
ctgagaggccgtttcagangccagtatcaactcgaatacgaaatccttctgcaatctgggccccatttctagttataaagacaagaagacncagcatgttgaaaatgggcacttagccatggaaacatttgctgtagtgaagccaaataatgaacccatctctataggtcagaggccagcgacgtgctccatcccaaacacgattacctttgcagaa

SEQ ID NO: 246 - DNA, 427 bp, Mus musculus
  misc_feature (1)...(427): n = A,T,C or G
ctgaggaaggcctcatganccctttaacgaccccgcacccgtncaagacaccaagccaagatggagcccgtttctgggcggtgctnncaagatggctagagagaagagatgacagagtgccaagaaagngaacgaacatgaggggatgtgggcncctgcttctgcacaccgttgtctntccagtgcacagatgggaccagntagacccagctgtatagcaggccangtgtccctngnngagcgcagctggagagtgacaacatccctgcttgcctcgtgtagtagtcagagctctagagagcctgccagagaccgccagatcctacccaatgacacagacctgcaacttcatcccgatacactgagttcgggttgtgccttctgtgctttccatttaaacaggcaaagtgtttgatgaaaaaaaaaa

SEQ ID NO: 247 - DNA, 292 bp, Mus musculus
  misc_feature (1)...(292): n = A,T,C or G
ttccagcatccacctggtggctcaaaactacctgtgattctaaagacacctgtgattctgattcgggtggatctgatgccctctcctgatttcctagattatcaggcatgttctttctggaaatgtatacatatgaggtaaagcactcacatgcgtacaatgaaaacagtctgaaaagttaataattaaaaattgctattgcaaanctgctgannngggaccgaaactcagttttaataccttgtaaaaatgggtatggcagcatgactgtatttgacattggacgatgaag

SEQ ID NO: 248 - DNA, 245 bp, Mus musculus
  misc_feature (1)...(245): n = A,T,C or G
ggcctggatccatatnctacntaaagaggactctggctgctgtgcgtgcgtgcctgcgggagcctgcccctggagccacataagaaagggcctaaaggactgcaggttcccagcagtccctggctgtcaggatttgggaacnnggaacagaggggnccagaaacccttcaatttataaattattctgngnctttcacacagaattttaaaggaatgntttcactttatgaattttaaaagaaaaa

SEQ ID NO: 249 - DNA, 170 bp, Mus musculus
  misc_feature (1)...(170): n = A,T,C or G
cttttgctaatgggatggtttggngatggagtactcctcctgaccgatggactcaaagaagaaaaggtaaaatcattttttttctcccctgtcntcctaggaaagcacaacaaacaacataggttgaaattaatattttttgagtttgattttcttaaattaaaaacaga

SEQ ID NO: 250 - DNA, 451 bp, Mus musculus
  misc_feature (1)...(451): n = A,T,C or G
tgcgtgtatctacttcnaagnctcgttatttcagncaacacccgtgcatggcttctgctcactggngaagttgcttgcngggtntagnaggagacctggtgnaanccctggccagagctgnctcgntcctctctgcttgttgacagtaaccaggcaacaggttcaggaaagacctgnagaantccagctccatgatcttgaaggactcggncccacccccaggttnncaggacatctcgagaggaacagaancatgggggcacancatgggggtgtgcncaggaagcagaggcncggcttacaganaancagaggttggngacttttacttggatggcnagatgananananccgccaagaggcgcacagtgcgcaccgtgctgtctgcaatgacatcttctggccacttntggaataactttcctttgaggaattggctttaaagaacgg

SEQ ID NO: 251 - DNA, 252 bp, Mus musculus
  misc_feature (1)...(252): n = A,T,C or G
catggtcgtacaaaagtananagaagtaaacnttatgaganganagagaatcctttgtgtggctntggctgncctggaactctctatgtagatcaggccatccttganctcacagagatctatctaccagcctgtgcctctggaatgctgggantaaagggacacaccaccataactactacatgntgctaagcaatgtgtttagaaaatattcctgcggggggtgggtatgggagacttttgggatagcat

SEQ ID NO: 252 - DNA, 197 bp, Mus musculus
gactgagccgccccgggactgcagagccttccacccacccagcacgctcagatcatccagtaaccaacccaggaagttcttgtaagcatgcatttcttagtcaacactgaatgcctttagaccgaggtcaaccttttcagctggtaccgtggtttacactgctggtgagttttgcttttatggttgaaaaaaaaaaa

SEQ ID NO: 253 - DNA, 197 bp, Mus musculus
  misc_feature (1)...(197): n = A,T,C or G
tctcagtactcggtttcttcngncttcttanatctacatggacgcagtaacttgagtccgttctgcttggtcganccctaccatccaacccaacgcaataggnaatccggncactgaaaccttcgctgnctaacatgnnaagtaatttctttcctttgtgtttagtatgaaatacattggcattccctactcaaaga

SEQ ID NO: 254 - DNA, 478 bp, Mus musculus
  misc_feature (1)...(478): n = A,T,C or G
gactgaggtcaactgtaattgctctacagttgtttaagaatctacctgtaagaaaccaattttactcaacagctaaaacgtgtaaagatgaactaaaacctgtacaggaccttctcataagctacggtgtcctgaaacctgacatgaggattatttttgtacataataaggtttggttgatattacaaatgatccagactttaatgggatctatgatgaagacatgantgaagatccaacgtatgagcccaatagccctgaagaaaaggctgtgtttatgaaatatgctgagagtataatgatgaagctgacattcagcaccgtccaaattcaacagcacgaaaacatctttatatttgagacagcctattggctttccaatgctataaagtacaaccaggattatctagacatttgacttaccagagactacaaaaaagactgtatcttcaaaaaaaagttattcaaaaacactttg

SEQ ID NO: 255 - DNA, 207 bp, Mus musculus
  misc_feature (1)...(207): n = A,T,C or G
ccactgcccacacagtataccntctatctaccccncaacttaatatgganagagcntaaaaggggctagagggatgnctnancncttcnaagntntggctntgagnnntatttccagcaccnaccatgtgttgcagatcataactgtggggcactgcaggcatgtggaacanagacatacatccagntgtaacaccaacaaatagaa

SEQ ID NO: 256 - DNA, 337 bp, Mus musculus
  misc_feature (1)...(337): n = A,T,C or G
ggaggcagtctctaccactgagccccattctncctcatggntgccctaagggactgagctacagtggaanaactgngccttctatccgagatgatnaggaaatggattcggagttnaagaatgactntgcttactcctacatatgcntnagacttgnttagnccatacattctgtncccagggccagttnacagtnnggcttgntttgctgngtagncnagggctccnaccggattnagngactcangtntgcatttcnaagagactaggcngcaggntccactatgcctgantcctatactggggattgaacccagagcctcgtgcacaaaaagca

SEQ ID NO: 257 - DNA, 107 bp, Mus musculus
  misc_feature (1)...(107): n = A,T,C or G
acaggacagtgatgctaagctactccttgntgcccnanctcanctcacagcctgnacgaggctntatgatgatgataggacacagagtcgctcctgaaaaaaagata

SEQ ID NO: 258 - DNA, 239 bp, Mus musculus
  misc_feature (1)...(239): n = A,T,C or G
attcactatgacatgttacagananctggctgtgttagcctactgtgctgcnancacntntgcctcgnggnctgagattgctttcttcctggactccattctcttccagagaatgccctagtcaggtnanacccagggacggaagcaccngaangactttttctttatagcttttactctttntaatcatctctaagaggaggnntagtaaccaggctctatgaccgtgtcactcaaaa

SEQ ID NO: 259 - DNA, 126 bp, Mus musculus
  misc_feature (1)...(126): n = A,T,C or G
catgtgattctgcagatccatttcancctcatccgtgcgttntcaggnnggacttaatgcaggcagctccannantcagtggggntnngacttantagcagnttggctccagctatactctgggaa

SEQ ID NO: 260 - DNA, 472 bp, Mus musculus
  misc_feature (1)...(472): n = A,T,C or G
agaaaccgatctcaagaggcaaagctaaggctacataacaagcagtcacgccctgaggtcccacgccaaggctggagtctcggagtgagaagcgtcagagagctgtaagccaatcaggaagcaagtgccagcatcctgagaaagtcctcctgtggccaaggccaagctgtcatgagttaccatctttgttccaaacgaactcaccttttgccagtgggaggggcttcagacgggccactggatccttctgnnatggtccttcacagaggagaggaacactgggaggtgtccaatgccctggtctgctgagccgtttctaagacatggaagaagcaagggagcactcgcatctgagaacaactgtgctacatcaggccccaggtgagtggtctgatcagactggaaggacagannaacagaaggacncannaagaaccagaaggacatgangatgaaggaccttgctgattga

SEQ ID NO: 261 - DNA, 289 bp, Mus musculus
  misc_feature (1)...(289): n = A,T,C or G
gactgaggacgtgttttagatgggagctggaactgagcagaacatctttagctgtcagtcactagctggagccaggaagactatatctgatgtcaactgccttgggtggcagagaggtagcagcnntgngctacacagatggaanagncatntgnncaggacntttacagacttccnccttcctcgaggaagccaccttggtctactataggctattagcaccccctctatccctngcgcaatctcttagtttncgcagctgacagaatanttcaacttggaaccgata

SEQ ID NO: 262 - DNA, 175 bp, Mus musculus
  misc_feature (1)...(175): n = A,T,C or G
tcctccttttctaagagagatgagagaagangacgannagangatgaagntgacctgaaanncagaacnagancntgagtaccatcnaaagacatgatnctgtctgcttcttcnccancgcacactcttgagcaagcaggctcttcttccaggcctggggaatgttctcctctgc

SEQ ID NO: 263 - DNA, 397 bp, Mus musculus
  misc_feature (1)...(397): n = A,T,C or G
actgaggtctttgagaaggatccctccccccccccctcccctacggcacaaacagaaatcgaggtaggttgggatgggtctgtaatttccgggagggtgctgagaatatacctggagtctttcaagcgtaaaacgaancaagatgagagtagatttttgatagggacttcagatganaggtaaatttacttaaaagtttttgaaatgtaaacgagaattctcattgtaggagtccatttctcttatctcgctgcgtaactaagccttaaaagagaacagttaaggtttttcagttactaataatgggngaaagagaccaactttgaaactcgtaattattttacttaacctacttatgtactcaactatgnttcaaacccagctttaaaaaaaaaaa

SEQ ID NO: 264 - DNA, 398 bp, Mus musculus
  misc_feature (1)...(398): n = A,T,C or G
gactgagggagagccgnnccatcaccattgccgatggaaacacttggcattnctgtgaaccgagtggttgatgnattcctcttgccagtcttcncccttgtcctggagatatgtgagccntcacctntacaggattctccctccttctcaggccgacatctctgggctngantccatctctcgncttcctagagnggcatcttcattacttnccaaggctcacgcactggactacccctnnatctccaaagctcaccaaaagtttcaaaagagccttcgttgtttattgggactgggtgatgaagagaagggaagaagaaatgtgtaagaatttcactctaaaaaactatcacgggcgactggggggtgnggatctggattttgattcgcaataaaca

SEQ ID NO: 265 - DNA, 119 bp, Mus musculus
  misc_feature (1)...(119): n = A,T,C or G
cagcccctaccggtgaccttggngnancatgagcgggggggatntgcatgactcganggatggnccacactntgncaggtcggataaaaggttgntcccccanacgcctttccctgaag

SEQ ID NO: 266 - DNA, 212 bp, Mus musculus
actgagcttagtgacacaggtgcaaggccatctatataaaaagggtgtccctgactggaagaaccaagacccccagatgctcctccatctgctgacgcgccaagataaagacagacggacgtaagagccgccagcagccttgactccaggcagtgctgcgattttaaaggagagcggatcccaaaataaaggtcacttgaggaaaaaaaaaa

SEQ ID NO: 267 - DNA, 195 bp, Mus musculus
  misc_feature (1)...(195): n = A,T,C or G
gactgaggtgtttgctgnatgtgaatagaggngcccatggggaccagagacgtcagatcctgnggngctgnagcnacanacgcntgtaagncacctgatgaggctctgtgtcctnatcctctggacgagcngnncgtcgagctnanccactgagctatttctccagcccctggaccagactgtcgctccaccctg

SEQ ID NO: 268 - DNA, 131 bp, Mus musculus
  misc_feature (1)...(131): n = A,T,C or G
gactgagggtggcgagggnccnaagtgaaagaaatatggagcttagaacctgagagtancngaaaagntanagncannncatggggataatttttcttttcaagaaggcanccaggagaagaacctgctgg

SEQ ID NO: 269 - DNA, 105 bp, Mus musculus
  misc_feature (1)...(105): n = A,T,C or G
ggatggcagataccagatgatctggaagccgaatggagggggtgctccagtgtanagaggcagatggttaactaaaaggagggattccacggtgaggctttcatg

SEQ ID NO: 270 - DNA, 144 bp, Mus musculus
  misc_feature (1)...(144): n = A,T,C or G
tcgcggtgtccctcctctgccttagnttcnaaagngaatgnntnngantgagtgggacgnacngngntactgcaaatttttttcgtggancntttgcagaaataggccatattctgtgctattaaacaagtcttaatataataa

SEQ ID NO: 271 - DNA, 203 bp, Mus musculus
  misc_feature (1)...(203): n = A,T,C or G
gctctacatgtatcagntgngccanatccgctggaccacatgcncagaaacgggatcttnnacagagacgttgtttttttnagantaggggtagtaaagcaggatgcccggaaactaggggacttnggcncatngccggagngnctattccaagcagccntncacagagtacatntctaccncgtggggtccggggccccaag

SEQ ID NO: 272 - DNA, 322 bp, Mus musculus
  misc_feature (1)...(322): n = A,T,C or G
aactgtgctttctaagttaaccgaggagcactggacatgaggcatcacacacagctccagcctcttcaggaggagttagcaccacagacttgaatctctcaccgggatgccggccacaccctcctcacctggtatctgtctgagtggtgcaggtcctccgtggcagaagagtgtggggaagccgttggagagtctccttccctcttgatggaagcagacaacaggagggactggaagaagaaaagaacacatggccccagaccaggttagangccctgagaggccccagcattacacctggggcaagcggaataaaaaaagg

SEQ ID NO: 273 - DNA, 212 bp, Mus musculus
  misc_feature (1)...(212): n = A,T,C or G
ccaccgcgatgcctgtccttggaaatctgngcatngncgatncttaccctgaagaatgctaatgtctcctccgggctttttccatgcggtggtgcagnggtgcacatacagctactgcctaaaatcaaaagaccggagccgagccccttcatttattgatctcctttaatctgcactttgttttgaataaagggacacctgttaatcccaat

SEQ ID NO: 274 - DNA, 213 bp, Mus musculus
  misc_feature (1)...(213): n = A,T,C or G
actgtggcaaacatgtgcngagancttactnnctggngacttagaacttgcncttatgccatcccatatttnnataaaacaggatcaccagtggaggaagacaaaaacaaactacaactntttgtctaaaataattgtattgtaatttaattgtaaagtagaaaaatgatttttaagctgtaataaagaccatggttatcaagtaaaaaaaaa

SEQ ID NO: 275 - DNA, 186 bp, Mus musculus
  misc_feature (1)...(186): n = A,T,C or G
gactgaggtggggatgggctgaggtaataatgtgggctgaangccatatnacttcttgcgtcnatgtgaanngtacgacaggnngccnngcngacaccnnnnntnctgtaccgngtacgcatatactcacatacacacattctctctctttaaactaataaaaattaaaatctaaaaccaaaaaaa

SEQ ID NO: 276 - DNA, 174 bp, Mus musculus
  misc_feature (1)...(174): n = A,T,C or G
ccatctcaacatgggncgngggaggagctctcgaggccacatctctncctgaggatcttngagcagtccgnaccatttgaaggatcacaagaaagttcaacattcatcagtgaaagcatgggacatgtgtgtcttagtttgngaagagacactgtgacctaagcaattctttaa

SEQ ID NO: 277 - DNA, 129 bp, Mus musculus
  misc_feature (1)...(129): n = A,T,C or G
gggttggggctgaggcagacctnggcagcaggccataatnanttnntgnggaactctcaaagggnggacagganctaanacangacaaacatgcnggcaagacaccaatgtacatgaaataaaataaaa

SEQ ID NO: 278 - DNA, 182 bp, Mus musculus
  misc_feature (1)...(182): n = A,T,C or G
aggacctgacctgggnggaggacgaggaagaggaanaagaacaggaggaagaggatgaagatgaggatgcaccanatatccncttgaggaganacntgngaaacaagtcaaanggntggctccccagatgcagacgagcntagcaaagaataagaagggggaaaangaagaggatgaaacag

SEQ ID NO: 279 - DNA, 143 bp, Mus musculus
  misc_feature (1)...(143): n = A,T,C or G
aactgaggtactagcagcctacttcttcggnctgctggtgtctactgaagaccagcagaggcgtccanacgcacggactgagcgacttctggattcttggaccttctgttcgtaattgntggagtagctgaccacagtctgct

SEQ ID NO: 280 - DNA, 128 bp, Mus musculus
  misc_feature (1)...(128): n = A,T,C or G
gatacctagtatctcttnaggacgtagntaagagacctgaattacttnnnanaccagtactanangannataagcgctcctaggagntgtaccgtgctggtgttagttagcattttttttgagaggat

SEQ ID NO: 281 - DNA, 263 bp, Mus musculus
  misc_feature (1)...(263): n = A,T,C or G
acgccggggtcttagacttgatcctcaacacancactntatgcctgccattttntccttggngacttgcttcacgctcaggaacccattaagcacanctttgactgatanttgannannattaacangcatttatatcatagatgtgagccaattatagatactttaaatatttcatatgtntatantatttagatgaaatgaantattaaatattttatattatattaaataaatactaaacntattttaaagtttacaata

SEQ ID NO: 282 - DNA, 213 bp, Mus musculus
tgagcgagtctgccttagtgaaacatcgtttcaccttttctgtttccagcgagtctgccttagtgaaacatcgtttcacctttgtctgcttccggaaaacacagcttcatggatctgccccagcaaaacaccatctgacacaactgacttttcaaagaaccctaagtttccactttaagtgttacataaattaggagactggaaaaaaaaaaa

SEQ ID NO: 283 - DNA, 114 bp, Mus musculus
  misc_feature (1)...(114): n = A,T,C or G
aggtctggacaggaancagccgnantgntagcanacctgangagccacacncctgcncctttctantggaccanagattattctggcgggaancgggacccctgccccttcctt

SEQ ID NO: 284 - DNA, 152 bp, Mus musculus
  misc_feature (1)...(152): n = A,T,C or G
tgggcaccggccatattacttcttgcggantgtgaaaggtcggacaggaagcnnggcngactccanatttnatgtacnnannacgtatatactnacatacacacactctctctctttaaactaataaaaattaaaatctaaaaccaaaaaaa

SEQ ID NO: 285 - DNA, 304 bp, Mus musculus
  misc_feature (1)...(304): n = A,T,C or G
actggctaccggtggatcacacgganaaagttcatagaggagagcccagtttgacacantcatctggatgtggnncgtaagactaactgcngaggantgncccnttngngaacancctaatgaagagagggnncgataagactctcaaggtcagcgccagacttgctttgtaatctcataaaaattcatgagagcggcgatagccgagatctgatacgnttagaatgagctatgagccgatgtgtggatgagtaattttaatgaaagaacaacnaatncnnaccagggtcacgaactcaaattt

SEQ ID NO: 286 - DNA, 229 bp, Mus musculus
  misc_feature (1)...(229): n = A,T,C or G
gactgagaggctggcagtgcngntctggaaagnctggaactgcactgngtacctgagggggnccatnccncacntctgcctctgagngctgaacatgccctgccacactgagatgcctcgagccatgttcaaattangttgtttgctgttattcttgggttttaggaatccttcacagattttgtatatttatcccttatcaaatataatacaggatttgcaaataaaa

SEQ ID NO: 287 - DNA, 166 bp, Mus musculus
  misc_feature (1)...(166): n = A,T,C or G
tcggagtgcgcatatgnccncaccaagatgattggtcgacntcgtgnctggcaaccatcnttgtctgctanntgaacnnctgcncaacacganggacgtggctggccttcatgtagacctattgtttnaggtcgctgtggtgttctncnttcaccgggatctagtt

SEQ ID NO: 288 - DNA, 342 bp, Mus musculus
  misc_feature (1)...(342): n = A,T,C or G
cacctgccaatcccttgcttaactatttagctccactatgtgtntgangctgtatcaagaatattacgccaacngccaaccgacttcatcaggctaaagcgcaggacttatgaaccagctcctgcctttatctcagagacacactttatttccnnggggncacgggaaatgtctttcctctcgccctnttcagggagggcagcccatatttgtgatagtttgactacatcatcacattccggntctccttcatggtctccagacttctttcacttagaaattcccattctgatttcccctgtgtctttttatcgctgaaaagattngctggatggaaaaaaa

SEQ ID NO: 289 - DNA, 244 bp, Mus musculus
  misc_feature (1)...(244): n = A,T,C or G
acgcgtgccaggctcttgngtggtcatttgattcccacnaggtgannnnaatanattaggcanttaggaccacatgctaacaggacagaatggnaaangatggaaggtcacatgcttcccagtttgtctggaaggtcacatgcttcccagtttgtcctgcttacgtatcggatgagacgcctgtaggcctctgggttactactacaacactcataaaatactgcttntgtgcacaaaaaaaaaa

SEQ ID NO: 290 - DNA, 171 bp, Mus musculus
  misc_feature (1)...(171): n = A,T,C or G
gactgagggcacatgtttntggatatggnaaactactgaagagctgtgaggaagtcatgatgtgctttgctagcaaagcacagcagtgggcacggaagacggcgtcctccccacacactacatgtcaatcagagatactccatggatcagacgtgagctcccaggtaatgg

SEQ ID NO: 291 - DNA, 229 bp, Mus musculus
  misc_feature (1)...(229): n = A,T,C or G
gactgaggtctatttgantacaaggcantggaagactttgctcagaggaaggtacccaggagctgctgccanagagccanatctcgcttcttcagctnagcaccgtggaggtcgccatgcanctctccacgagttccaatgttgaattcttccacaacattgagcctaatgaatacataggtgatttatttaaactcaaataaaaaaccagcttagccaacctgataaa

SEQ ID NO: 292 - DNA, 142 bp, Mus musculus
  misc_feature (1)...(142): n = A,T,C or G
ccattgtctttataaggaatttttaaaatcagtgagtaanggtggcaattcangagnccccattgtntatctgggatatcaantggcaagtgactggacaagtacaagattctgacctccctgtnttctttaaaatgcaacc

SEQ ID NO: 293 - DNA, 213 bp, Mus musculus
  misc_feature (1)...(213): n = A,T,C or G
gactgaggagctcactacctngagccctgcctggtgnggaactcancagaacagcctgccntaaccttatcatagcantgctgggtnnacaccgngngacngaccacagtacctgcctacctgntctcctgtgctngncacgcttagaagtnanaaagcctggacgggctgctggggtgtgatttnanctggtctagacccgcccttccttag

SEQ ID NO: 294 - DNA, 150 bp, Mus musculus
  misc_feature (1)...(150): n = A,T,C or G
tctcctactccatgcttgatgacctgaacaacagtcaagacnctgggcggggacttgcttgcatggccctcancgagatcacctgagtgtngcccgcatnngtgagacctgnaagtgcacacactcctttnnaccttgggaactacctgc

SEQ ID NO: 295 - DNA, 250 bp, Mus musculus
  misc_feature (1)...(250): n = A,T,C or G
gactgaggctcaatgacacccttcgctgatctgggcccttggtgagtttccgaagcanannctgcccttggattggngctcgctcncactggcccnctnctcatgccnncaagttctangaagcanganagngacctctnacctcatgaaagcnnngggacnggttactcactgtgaggcctcatatggctttagctatacaaagtcaacaaaccactttacagcacgtaggttttggtttttgttgatg

SEQ ID NO: 296 - DNA, 252 bp, Mus musculus
  misc_feature (1)...(252): n = A,T,C or G
gactgaggacgtgcatgcgtggntttccagtatctcagntgntgacttgcttagatgggaccgacagaggataatgacatcaagaaccctgctgattagggccagtaagacagntnagccagnanacactcnacgtgcaagcctggcaaaccgagatggatttctagaacctaatgaactccgtaagagctgccattttacctccaagtgtaccctgtggtatgttctnacacatacgacacatacatgcta

SEQ ID NO: 297 - DNA, 144 bp, Mus musculus
  misc_feature (1)...(144): n = A,T,C or G
ctattgccttttgtcgagaggnggngntgtcatanccgtctctccacaacagagttttaaacataaanaccctaccgattcacnaactncacctgangtgcaagtgtgcantcccttaaganngctggtttctacttccctttt

SEQ ID NO: 298 - DNA, 270 bp, Mus musculus
gactgaggctttcagcagctccccttgccctaccagagtccaaggagatggcaattcgaaccgcttggattaccaggtttcattaggtaagggcgactgatgcaaggtggcccaaataaccttcgtgggacagacacggcttttcgaagccagcagaagtctcgccaaattgaaccgatgtcagatgaagttctgtgaatatctatgtccttctctttggcaccagagaggactaattaaatgctcgtgaagtgctttgaaaaaaaaaaa

SEQ ID NO: 299 - DNA, 452 bp, Mus musculus
  misc_feature (1)...(452): n = A,T,C or G
gactgagggtgatagngagccaccttcttgtggaggaaggcnatgggttcctgttggtcttggaccagcagcctttcactcatctagggacacatcacctaatctcncangcaaacactggctgcnccagcttcgatttctgatctttntggacccagaagaccctgccccagcctggacccagnactgnagccatgatggaagaagacataggagacacagagcattgncgacatgtgntccaggagctaatgcaagaggtgaaaccctggcacaaatggaccctcataccagacaagaaccttcttcccaacgttttgaagccaggatggacgcaataccagcaaaagacctttgctaggttccactgtccttcctgctctcgaagttgggcatctggccgagttctgatagtcttccacatgcggnggngggagaagaaggccaagggg

SEQ ID NO: 300 - DNA, 160 bp, Mus musculus
  misc_feature (1)...(160): n = A,T,C or G
gactgaggccccttcaggaagctccaggcacctgccgggnaggtggaaggacatctcctttgaggctccgncacactgccctgncctnatgnggtgggccagtgcangtccagatcngncangaccacacngagctgcgtntcttcactaggcctcctgt

SEQ ID NO: 301 - DNA, 190 bp, Mus musculus
  misc_feature (1)...(190): n = A,T,C or G
atcccacaggcatcccacatctnctttaagaacaatanaccctggacttggctggggtcaagaacaagatgccttctggattcctgaagatacagagggtcaggaaactcccaatctctgncctctttgggacccaacagggtcctgcntctatagaacactgatttatggaatatcccaaaaaaaaaaa

SEQ ID NO: 302 - DNA, 322 bp, Mus musculus
actgaggtggggtctttactggacatgtcagatgacccagcgttagattcacgatgactgcagctaatctgggagatgcaggactggacaaaggaaggatgagagcgaagtgtgctgcccttggcttgggggagagtcattctgtaacatccaaggaagaggctgcctgctctcccagtcaacagcccagccctccccaggccagaggagcttcaggcgcccacagcttgctgtcacagctattcaactcatcagatcctgtctggactttctgctctccaggaaactcaatacagaatctagtttcccacacaaaaaaaaa

SEQ ID NO: 303 - DNA, 213 bp, Mus musculus
  misc_feature (1)...(213): n = A,T,C or G
ctgagtcacttcccagcagccagaaccggacatagctacagctgcctgagcctggatgcacctttcccggntctaggcctcgacttttctacccataaaacaggtggccaccacattcacctcaaaggaactttcgaggtttgaagaaggtcatanagaagcccccatggctggctcagagctcgcttcctcctcagaagcacgcttccccac

SEQ ID NO: 304 - DNA, 231 bp, Mus musculus
actgagaggtccaaaagtatggtattagattccatgggaattggagtacaactggttgtgaacagccacgtgggtacagggattcgaacctgagccttcttaggaaccagtacttttagtgaccggccctctcctcagccccttgttgaagtcatgagctacaaaacaagaactggttttaatgagggtgatggcatgcctaaatacaccaagaaggaagaggaggaagag

SEQ ID NO: 305 - DNA, 132 bp, Mus musculus
  misc_feature (1)...(132): n = A,T,C or G
ccaaacgacaggctagagacacaccatggagatgctaggnaatcgaaactanagccttttntgagagngggggntggcannagccgnctctccaccacaaagttttaaacataaataccctaccgattcaca

SEQ ID NO: 306 - DNA, 142 bp, Mus musculus
gactgagttccggagctttgacatcttcttctgacctcccaacctcctgcacgtatgtggcacacacaaactcacaaacacactgtactatgaataaaataaacagatcttaaagaagtaaaaacacactgaaaaaaaaaaa

SEQ ID NO: 307 - DNA, 195 bp, Mus musculus
  misc_feature (1)...(195): n = A,T,C or G
gactgaggtggggtctttcaccgcttcgtggtgccggtagtgcgtccagccgggaagcgtctcggngacccattacggcccgggagaagtagccgngcggtatnaggngggccgggtagacttanntcttcgctgacgcggtttcattgctggaggtttgagtattaaaatcacacgcgcccagacaaaaaaaaa

SEQ ID NO: 308 - DNA, 191 bp, Mus musculus
  misc_feature (1)...(191): n = A,T,C or G
gatgtgcaccacgccccggcttggccancatctctcacttgaagctgnatatctcctgccctgcacgaacancagcntgagagaangagaactgggacagaagaagacaactagctcctgcangttntcctgacttccacacagangccatagcatgnacatgccctatcaccatataaatagatttttga

SEQ ID NO: 309 - DNA, 177 bp, Mus musculus
  misc_feature (1)...(177): n = A,T,C or G
agggagcctgtctgacccctgtgtcacactggatggttttacagaggtgccccacctgatgctggatggaagtcatcaccctacagtgtgggtatcaaggggggagcaagggggctaggaagctccanagggattaggtggtctccagtcactcccctctgtgtgaaccctgctgct

SEQ ID NO: 310 - DNA, 208 bp, Mus musculus
  misc_feature (1)...(208): n = A,T,C or G
cgagacctcatccgtgncaccccatantggcaatgcctantntccctancaactgagctnagctgacncattatnaatgcnaagggatactangggnngntaatgaangcntacgctggtactattaaaaagggaatcaaccccccttcccctccttcataactgcgtgttggaatagtaaaattgagctttaatcagaaaaaaaaaa

SEQ ID NO: 311 - DNA, 102 bp, Mus musculus
  misc_feature (1)...(102): n = A,T,C or G
gcgataccgttgtgagccactgnnccatntctcacacagcagngctcaaattagaaacccnggttggaanaaggtatccttcccaggcagaggctgacaaat

SEQ ID NO: 312 - DNA, 345 bp, Mus musculus
  misc_feature (1)...(345): n = A,T,C or G
gaaaagacggctcctgngacacgcggctnaaccaatanangacacgacttgggaccttccagcaacanatgnacatntntntggcaacgcaactgactgctgagctttgnngaaagtaccatgacagtgaggnaagcataatgtctaactagattaattaattgctgttcaaatggatgttattactctcaaattgtactacccatggaacagttaattgactgtacaatctcttgccttctcaactcttaccttaactctccctactactctgcctttgttcttcctatttctctaggctggatattttcttctgataattccactccactataaattttcaca

SEQ ID NO: 313 - DNA, 433 bp, Mus musculus
gactgagactttagccgcacctccctccctgactcagcatggaggaaaagtcagaagactgtaaggtcccagaagatctgttcaatggtctgaaagtcgcagatcctcaagaaggagagtctgccagccccatggtttctgatcccaagggtcagcactgccagagcaagctgccgaaggctgctgaagcccatccacaggacgaccatgttgaagaggaatgttttcatgactgtagtgcctcgtttgaggaggaacagccaggggcgcacgtggcagggagcaaagccagcgatgattctagttctgaactggatgaagaatacctaattgaactggaaaaaaacatgccagaagaagagaaacagatagaagagaggagagcgctaaactaaaggaggaggggaatgagcggtttaagagaggagattac

SEQ ID NO: 314 - DNA, 252 bp, Mus musculus
  misc_feature (1)...(252): n = A,T,C or G
caaatacatgagagatgcaagtgcataacatggccaagaacatgaccgccctgtcagctgagcatgcgtgctgggaccctgggttgccaatgtgtactgcatgggaataggggctccacccgtacaaaggatgtgggcctctccacagaccatgcnngnctctcccagattgtacatccaagaggtgccccatgtntgatccccacctgttacccttgagtcaagtatggaaaaaaaaatgactgaatggta

SEQ ID NO: 315 - DNA, 475 bp, Mus musculus
  misc_feature (1)...(475): n = A,T,C or G
gcagacgccatacttactncttgtggaactctnagnggncggncaggaagnaanatangccnccnnntcggtcaccctgaagtctgttctctccacccaactcactgccaggaagcccggtccttctcctccctgtacttagttttagcccaggaagaagagtggtagccttgcagatagaccctgcaggtagggaacacacttgacatcctcccaagacagatgcctctaccagatgtggcaaatgcacagggcttcatacaccccaggattacttcagatggagccccaacacaaaatcatattgcacaaccctcgacgacgacgatgatgatgacgacgcagtgncaaaggctagactatctccttcaggcttgggggatggctcagagggtacaggtacttgcctccaaggctgatgtcatgactccttgggtcccacctgatgggaaagagagacctgactcctgcaaga

SEQ ID NO: 316 - DNA, 212 bp, Mus musculus
  misc_feature (1)...(212): n = A,T,C or G
attctgagcagaccctctgnnnncgatganntggntcactggttgtnagcacggcaaactgancangcaaaggatggaggcttggtttctagcattcattctaggccgctcacaaccacccgagacaccagtttcagggactccgacaccttctgtcctttgcagtcacctgtatgcacatgatacatgtacccataaaataaataaattaa

SEQ ID NO: 317 - DNA, 262 bp, Mus musculus
  misc_feature (1)...(262): n = A,T,C or G
atgacactgctgctgaggccaagagctactacatcaggagtaggaagaatacaaaggggcgtgaagcagtatctnanaaaggggcactanttangangantngctgaggagctcggngnccagctgaacgaagacannanttnannacactcatctactnttggtctngccttctatgcanctggttggttgggcanggatgagntttttaaggcctccattaatcntnaggacnagaaacaaantgggtatgaaccgtctg

SEQ ID NO: 318 - DNA, 107 bp, Mus musculus
  misc_feature (1)...(107): n = A,T,C or G
tgaagagcgacgaggtggaagagcnagtatctccaccacaaagttttaaacgtagntnccctacccgattcacaacngcacctgtcgngcaagtgtgcagtccctta

SEQ ID NO: 319 - DNA, 218 bp, Mus musculus
  misc_feature (1)...(218): n = A,T,C or G
gagactgagcttggacagcatacagncagcagttngaancaaggccagtttcttgcctggtggcagcttgncacatttgaagcaaactccacaaggatgntcttcaatgntcattancttctttgaaattgcangggggtactgncagaatgtgacatgtctcattgtcaaaaaagncttaagctaataaaacatctttaaatgccaaaaaagaaaaa

SEQ ID NO: 320 - DNA, 134 bp, Mus musculus
  misc_feature (1)...(134): n = A,T,C or G
aaagagatgcgccggtgtncagactagaannttattggaaagcagtagggggccnaagacgtctntccactcacntagggagnannatanataccctaccgattcacaactgcacctgtcgagcaagtgtgcag

SEQ ID NO: 321 - DNA, 152 bp, Mus musculus
  misc_feature (1)...(152): n = A,T,C or G
tacagacttgccatctcnagaactacangctaagnctgtgtgccgangacctantctnttatnggcatcanatcactngnaactggagccaaaaacanctgtgagtcaccatgggagatgctggccaattgaacctaggctttttttttgag

SEQ ID NO: 322 - DNA, 152 bp, Mus musculus
cccctacctccccaaaacatagctcctcattttccttctccctacccagaaggtccatgggatcaacaccgggacccccctcttaccaactgtgccaccctgagtaggttacctatgactttggacctcagttcaaggacaatgccaggcgt

SEQ ID NO: 323 - DNA, 222 bp, Mus musculus
  misc_feature (1)...(222): n = A,T,C or G
tcttaactgctgagcccnaactccagcaccttggtgggttagggngtgnggnagangacattctgcagggcacggnaggccctggctcaggaaggcacccnttttnttagctggggganggctctcgtgaacgcaaggtgcctgcctccccgnatcagntcgcttggncagctctnggggggctnggctgtgggctttgccctngggaagcgctggctgagg

SEQ ID NO: 324 - DNA, 168 bp, Mus musculus
  misc_feature (1)...(168): n = A,T,C or G
ttggctctctggcctcantgaacatttgaactcaccaaggaagcttttcaaagattcctccgagtgctgagcacacaggccgtgtgtgcaagtgtgngtgtnttcccttgggagtttagcatgctgnacacaccatggcagtctatcnagccattccccagtcatttg

SEQ ID NO: 325 - DNA, 166 bp, Mus musculus
  misc_feature (1)...(166): n = A,T,C or G
agactgaggactgatttgtagagggaaggtntgcgcattnctctcggcggctgctggngttggtggnctgatttatgccttacagatctccgtgctcggntgtnctanctggttccagnatatnagattcatgttgctgattnggagcacatgaaatacctcttaa

SEQ ID NO: 326 - DNA, 299 bp, Mus musculus
  misc_feature (1)...(299): n = A,T,C or G
tgttggcggtgttgtctcnctcttctcagaggtggaagcaacncngnntngtacgnctctatgngtacaccgggacgannnanncggccatnttcctggtgaggccttccagaaaactcctctgaggtccagtaggagtttgattaatggtacttttagatcatcgagggtaggaccccagctctgtcctcatacagtggctctcagataccctgctcttgttcacgtttannggntgaaatcagaangaactccaaaagatgtgattatactatagcctattaatatttactaaagat

SEQ ID NO: 327 - DNA, 148 bp, Mus musculus
  misc_feature (1)...(148): n = A,T,C or G
tggacccttagctcacccactgggctagactggtggccagcaagacccaagaatntcctgcctcaacctnaganctggatgataggggctcactgctgcacctgactttttcacatgactgcttgggaatcgaacccaaaaaaaaaaa

SEQ ID NO: 328 - DNA, 134 bp, Mus musculus
  misc_feature (1)...(134): n = A,T,C or G
tgcgccttctagaaatgatggggacnctncacccatgttacccaaacagtatgnttgnctanaacaagaccctgttcaagtncntcaccaacngacatgccaattntggaaaggaaatcccccctggagtccct

SEQ ID NO: 329 - DNA, 325 bp, Mus musculus
  misc_feature (1)...(325): n = A,T,C or G
gaactgagaccttttcactgaggccgttgngntnggctgacntcttgtntctggnctntttnaccaccctgaccttcacagnggctcctaangatgacagcaggnattccctgctggncagnaggntccagctcagggaggccggggccacctccaaggaagctgagacccttccntttctaagncagtgaccatcagngcctttcatnaaagccaccctgagcagcccatgcgctgctggactcccactttagtacggaatgtttgaaacatcngaaattnataaattcccaaatcttgaaactgcatcattaaataaaaaaaa

SEQ ID NO: 330 - DNA, 291 bp, Mus musculus
  misc_feature (1)...(291): n = A,T,C or G
gactgaggcctcataaancctgccgtgcccgctccagnngccanancacatgcatnacagntnncacnggacgtgctatccantcacaggctnntggcatgncccaaatgccctgctttccagantaaacactctttcattgcttaaaggccanattgggagaaaacacanttttgaaagggatccaaaactaacttttgactctngatcagtngcctcangttttagggttgnatgaanaaccanatancaggcaaataagnacctgcttcaaaaggtgaaaaaaaaaaa

SEQ ID NO: 331 - DNA, 167 bp, Mus musculus
  misc_feature (1)...(167): n = A,T,C or G
gaactgaggtggggtctttcntagcactagngggcagcnatggcctggctgatgcctgncacctgntgttgtcatcggatctcaccctactcacacaacccctggagagaagaacatcttggaaataaatgtncaggntctggacgctctaaactgaaaaaaaaaaa

SEQ ID NO: 332 - DNA, 309 bp, Mus musculus
  misc_feature (1)...(309): n = A,T,C or G
gactgagtttgtctgtgctaagagccctgtctaccagccagcccatttagaacagaattcgccatatggacgtgagccaggagttcctaatgaactggagcaaccaaagaagaagaagaaagccggcaagctgacagaggctagcagtgggaaatgtagatcagcttttacctcctaattggtgaccttcagcaaaagaattctttagagtttgggggatgcagctcagttgttgcataccantccagtatgccccagaccctgggtgcaatctacaccaccatctaagaaagtttcaactaaaaaaaa

SEQ ID NO: 333 - DNA, 212 bp, Mus musculus
gactgagatgcaacagagggtcactaggacagggggtttggagaggcctttaccatcacagttcacgtcggctaactatgcgtgttgcttcatgttactatgtgcctgaccaggcacctctgggaaggatgcatgcccccatgctgtctccatttattggttgaagaaatacaaggactaaatggtggccttaagaatgatcttaaacaaaa

SEQ ID NO: 334 - DNA, 300 bp, Mus musculus
  misc_feature (1)...(300): n = A,T,C or G
actgaggattagtgaggatcctcnaggaaaaccancangttccatattntntgnanctggnnctannntaaaggcgggnagncnttcatgaggctgntgncattccgnntggggccacgggccaccaagctcctggccacacggnctatcccggtgttcagtgggtgcaggaggtcttctggaccaccaacgaccatcccgaggagcagaagcggagtcagctccagttatntggaagagggggnctttgcctggtggaaaacccacngagnnttcacaagtccctgggacagctttttt

SEQ ID NO: 335 - DNA, 139 bp, Mus musculus
  misc_feature (1)...(139): n = A,T,C or G
gatctatggagggcttctcatgtttgangtngggctttttacccctggaagcaagggaaagagggggagactgtttcaaanctgtggagatnctcctgcatgtctgcttcagagtcngaggttcttgtatgcttggaat

SEQ ID NO: 336 - DNA, 117 bp, Mus musculus
gatgcccctgaccttcagcagagatcctgggctcttcctccctcccttggagcctcatcttttctcgcttaaattaccactcctgaataaagtttttcagagcttgaaaaaaaaaaa

SEQ ID NO: 337 - DNA, 379 bp, Mus musculus
gactgagtggcagagtcacagttgttggagatacctcaagttaagctcaagatgcctgagacccatgatgacaagaaagacaactctgccgggggtaccatgcttcagagcacaaggcagtggcctcctgtgggccccagtggatccctagtccatgaagaccccaactcatgttgaggctggacccgggcacacaacacacattctggttggtaagatggttgaggaggcagaagagccttctacaaagcctcatgacctgactgagattccccaggactcacatgcaagggctgactcctgcaagttatacaggcatacaccacctctacccaacacaaataatgtaaatagaataaagatcttaaatcaaaaaaaa

SEQ ID NO: 338 - DNA, 379 bp, Mus musculus
  misc_feature (1)...(379): n = A,T,C or G
gactgagggtttatttnctcctatcctctggacctgtggtgtcggcccatgacggatacngtgancaactncctgaaagccaccaantgtgtgttttcctgagacctgnaaggaagganaagagcagaggctgagaanatgctgngactcactggatcctctgngtgagggaatgctgggtctcaccaggatcctctgtgttcatganagtgttttatgaangctccactaactgaagattgcagtaagagagacttgnttacccccangatgacnctngnatatgttcncatctttgnctgntcacatctctgtccgttcacacgctgagaggacctttctccagaataaatgcctaggctcttccaataaaaaaaaa

SEQ ID NO: 339 - DNA, 295 bp, Mus musculus
  misc_feature (1)...(295): n = A,T,C or G
gactgagagggtgcagtctggtgtggcacaatgctggaggaatatgacatgtactgaaaagatcagagtcagagacatctgtagtcaccatcctcaacacctccactatgtaatctgtgctttgccatccttccaacatcatgggatttaaacatggcgtccagattccatctgaagagttcagagcctggcgtttctcacggccatcataccatgcttctgttactgcagtctaagcttanggagccctatcacactgttggctcaactcaagcctttggggtcaaataaaacc

SEQ ID NO: 340 - DNA, 129 bp, Mus musculus
  misc_feature (1)...(129): n = A,T,C or G
cgtgcctgttgactctgagcccagggttncctgnttcagattggtantccctggttactaaanangacaccnantaannangggcccacnctgncatggaggcagagagataagggaggcccctccccc

SEQ ID NO: 341 - DNA, 143 bp, Mus musculus
  misc_feature (1)...(143): n = A,T,C or G
gactgagatgcagtttcagcatccagcttcctgctcctgtagcctcttcagctaccacatctttctcactaggacagantgacgctctcaaactgttagacacaataaaccctttcccatcaacctgtgtttaaaaaaaaaaa

SEQ ID NO: 342 - DNA, 186 bp, Mus musculus
  misc_feature (1)...(186): n = A,T,C or G
gacagattatattctngccggtaataggaactcgctgcccacttccntnatgananggcgncccaacaagaaaatttgagccttgatcnggctaanctnanacaaaacaagtaccaaggnaagnngaggccncnngagtagggacangatgagggaacactggctttctatcgctactcctgacat

SEQ ID NO: 343 - DNA, 531 bp, Mus musculus
  misc_feature (1)...(531): n = A,T,C or G
gaactgagaatctacccaaagccctgctgtggaagtccatcagctctcaaggttgctccttcaggaccatagtgtcaatcctgctgaccgctcatcctgggcatcttctctcactcaagagaatggcaaattggcctgcaacttctcagagaccccttcacaggacagccactcccacacccctatcggacttcccatgctcagttctgtgcctccagaaacctaggtgacaggaggttgggaggggcgaggctcggctggagcctgctgagactgatttgcctcagatttccatagctatcttggttccaccagctgggatttttctacccagctcctcttcagttccaagccccagagagccagcctccctggaggtttgcaaggtttcaggcaccgngggccaattgagctccagggttgcttgcttgaagtgattactacgagcctataatgctaagatccctggaattttatttgacaggtcattgagtttagtatgaaatttggtatgaaatttgggcttggcca

SEQ ID NO: 344 - DNA, 174 bp, Mus musculus
  misc_feature (1)...(174): n = A,T,C or G
tagggctgagtatacctgggcagaggccatantnacttcttggggaactctcanaggntctggacaggaancatggcanggttgcatanatgaagagccanacantntgcanctttctantgcaccagagantattcggggggaattcggntcccctcccccttccttaataac

SEQ ID NO: 345 - DNA, 149 bp, Mus musculus
  misc_feature (1)...(149): n = A,T,C or G
gagactgaggtgggacagggctgagnataaccngggcagaagccnaatnacttnttggggaactctctncgganggacaggaagcatggctngttcgcttncacnagaagccacacnattgttgcgttacttgagagatcgcaaaatga

SEQ ID NO: 346 - DNA, 266 bp, Mus musculus
  misc_feature (1)...(266): n = A,T,C or G
cctgagcagaggtctnttnacnncattgtggnctnctcaaagntccngacaggagnatnntatgctnncatatggnggntgaaaatatganntatgacatactaacagtagtgcctggttgacagtggtgacaaagctgactgcactgaagcatcaggtgtttgtttatacaggaccaagacaaacacacttaagatagagagcattgattgcatcgncagctcactgtttatataccaccagcttactatggtccatacttaaga

SEQ ID NO: 347 - DNA, 114 bp, Mus musculus
  misc_feature (1)...(114): n = A,T,C or G
atgggcatgggtcgantggaaatggagctggattatgccnnggatgctaccgaacggcgtcgtgncctagaagtnggnganggaggacacagaagatctggaggcaggaggtac

SEQ ID NO: 348 - DNA, 199 bp, Mus musculus
  misc_feature (1)...(199): n = A,T,C or G
tggggcagtgtctgaccgaaggtccacaacaccgtaattgctttacccaaaagcaatctttttgagcaatcttttacccaaaaagctattttgcaggtgaatgaacatnggagtttgaccctcactgaaccccccctgaagcacacattntttaacatcggcccacgtgngctnctggcanccccaaaaccaaaggggt

SEQ ID NO: 349 - DNA, 405 bp, Mus musculus
  misc_feature (1)...(405): n = A,T,C or G
aggctagactgactcgcactgacacggntcttcattaactagcaacagaaggcttnctaattcggtgaatgcttatnatccngaaatatgcccaangttcaanggctacatanccnntttnanngcancctaaggctaccaggggttcacctnnnanccatatatgggcncaannncanctcctatntgacacattgccacctcccngttnagagcnaaataccccattgntgngntnggngctntattttcctggcctgttctatgggacgggtgaagcctcctggnagcagcatntcatgagccctaccttnattatcttttaacctgntctaatctggcctgattatgttggaaaacctactgaatatgatntgnaaaataaaagattcattcctttgacaa

SEQ ID NO: 350 - DNA, 488 bp, Mus musculus
  misc_feature (1)...(488): n = A,T,C or G
gactgagccccatcccccagctctccatgttttgggaggttacctgcagggaagtcaccaccatccctgcggggttgagactaagctatatttgagtggaatcatttctttggtctgctgttggcaccctgtctggggtacctgnacacatagtacgcccagagcaaggtgaggccacctganaagnagaagacactctgccagccacactgntccaggagcacggagcctacncccccagtcaccagggtnctggnagacacanagaagngctgnagtgaccttggttgctatcctannaagagtcaagctcccanagagaggccgctcgctcggatgctcctgcctggaggatnntgctcttcagggagactgggggtgggacagctagggcaaggggaatctggnggcagctgangagactcancatggaaactactgctggggnnttcattncttccttctagaactncaaactggcctacaat

SEQ ID NO: 351 - DNA, 156 bp, Mus musculus
gactgagcaggcagctcacaactgcctgggtctcagttcctggagaattcggtgctctcttctggcattcacaggcaagtacatgtgcatgctaacacatacatatgcagtaaataaaagtaaaatgttgaaaaataaaaatttaaaaataaaaaa

SEQ ID NO: 352 - DNA, 133 bp, Mus musculus
  misc_feature (1)...(133): n = A,T,C or G
aatgaacactcagctctttctgcantgccnggactntctgacngcctgnctacctgntgcngnagacgnnatgactaccatngacnctaaccttctagaactatgagtccnatattagacgctttcttttata

SEQ ID NO: 353 - DNA, 141 bp, Mus musculus
gttccaggggatcttatgccctcttctgaactccttaggctttaggcacacacactgtgctcagacatactcacaaaagcaaaacctccaaaatataaaagtaaaatagataaatctaaatttaaaatactaaaaaaaaaa

SEQ ID NO: 354 - DNA, 488 bp, Mus musculus
  misc_feature (1)...(488): n = A,T,C or G
gactgaggaataccggggattgaacttggttcatcaggcttcctcagcaagtcacccaagcttgggtcacctgagagtgtcttgggagtctttggttgattttgttttcagtaatggaatgctgaccaacacaggtaaggttnanaatatggaactaccaatccancctgatnctantcttcattanggtanggcacgctagcatttnctgntgaatgaatgnnaggtccacacctatagtgcctacacacactcaatagcatacatgccagccnnnggaccttgantgngcnacctccnnggcttcctnttctggnatagagtgaatcaccgagtttnaacnaggactgaaggaatcagtgnanataanaggnaccngactnggggtgttcttntataaggngtacctggggttgttcgtatttgatggcaaanatggggtagncatggctcaagatgggataaaagcccacacccagggcagtggt

SEQ ID NO: 355 - DNA, 105 bp, Mus musculus
gactgaggaaccggattacaaaggagacggcttcctgtgatgctcagctgtgattactttcaacattcaccctggatgttctcttcactgtgggaaaaaaaaaaa

SEQ ID NO: 356 - DNA, 127 bp, Mus musculus
  misc_feature (1)...(127): n = A,T,C or G
ctgtttttcctgtgcgcngtcgtggaatgggaagcacnagncnnccctgctgatanncngctccnttcctaactcacagganccatgcgcaaaataaacgagatttaacgtcatagcaaaaaaaaaa

SEQ ID NO: 357 - DNA, 406 bp, Mus musculus
  misc_feature (1)...(406): n = A,T,C or G
gctttccaccgcttcctccagccagtcttctccgaatgagcaaaatacaaacaagaggagcaagcaaaaccctccgaatgtgtcagatggacaccagagaacccgccccagagaggagctccgctctgtcaatctnntttgtctggtcnnnggaacaaagaggtgtcaggttcagaagtcaaatcctaaggaggccacagtagataaaccgtcagctggcagcactgagaacagaaagtcctaaccccaaagcagaggaagcngactgggggaagggagagcctaaagggacgggaaggaagttttgcaggcagaggcangggacagggtgctaggaagaggaaacggtgagcctggcacaagcaggtagagactgggagtttnctctggattcaagttgaaaggc

SEQ ID NO: 358 - DNA, 313 bp, Mus musculus
  misc_feature (1)...(313): n = A,T,C or G
atattatagtggtttagacctanaatattantttaagtactttgtataaaaggagcccttttatgcactctagtatatgctgagtagatctggcaaactcaggaaagagggacttaaagaaggacttttcaaagcgagtaacatctagctgatgtgatcaatttccagaacaggcgggagcctcttcacctggagtatgtaccactggcgcctctcccgttatcattacttggtacgtttaaggaactaaagtaactttaaaagttcaaattgcaccgggtggtggtggcgcacgcctttgatcccagcactt

SEQ ID NO: 359 - DNA, 193 bp, Mus musculus
  misc_feature (1)...(193): n = A,T,C or G
gactgagatagaagganaaggacaaaatcaccagcactggctgaaggtaaatatgtctttgggggaattgattgttgagacatatgtgaaatataaaataaatataaacctacattaagaaaatatcatttagggaaaagtttttttatatattgaagtcaatataaaacttactaaaagtataaaaaaaaaa

SEQ ID NO: 360 - DNA, 344 bp, Mus musculus
  misc_feature (1)...(344): n = A,T,C or G
gactgagggagaccagcaagccctctactgtatccatctgctcaacgccctcctgagaaagctagtgtgaaccggaagcaactaatcggaaagactcatgctttgagccaggagccaggagctcagaccagcatgtccagcggtagccagcactcttcagccgccagcgaaactggagcccagatgaattgtaaacgcagccccagggtacattccctgcaggacactaggaggatggatttttcttttatcgaaagagagtgggttccaggccatttattttgctcctgtttgattcacacagaaaggttagtantgacagcntcatcatcattattattatt

SEQ ID NO: 361 - DNA, 132 bp, Mus musculus
  misc_feature (1)...(132): n = A,T,C or G
ccaaggtaacggtaaccatggcaacctncaccctcacagccctgcttttcctggaggaaaagatgtccanggcatgaggacaaagctgctgcagngagcactggtcttctccangtggaaaggagacctggg

SEQ ID NO: 362 - DNA, 490 bp, Mus musculus
  misc_feature (1)...(490): n = A,T,C or G
gactgaggaagtagacagccatcatgatagaagaaaaggacctagagtgacagactacttcgttgtggcaggtctcactgatacatccactcttttggatcaagaaataaatcgtacagatactaactcgattggtcctaaagctccaatcacagacattgctgttattatcaaatcagctggggaaactgtacctgnaggctacacntgngtggaagccactccatcannactccaagngagcttgnattacggnggtnngangagcccanagcntntcctgtgctacaggagagggagagancanccgncccttacagatagtggagcgctatatgaagggaaagaaaggcttatgccangatgcgaagtgatccacgccacgccgccggccgntgtgccnatgncaacaataggncaactncttctcagagagtntttatcacctatcgaagggctcccccagngcggcccagaattccttggccgg

SEQ ID NO: 363 - DNA, 135 bp, Mus musculus
  misc_feature (1)...(135): n = A,T,C or G
tttttttttttttagggncccgtncaaagaaacaggggggggacaaccnncnagattncccntncttttttttnttcaggggntaaagncntctntaaagaaggcgcgcccggcgaagaacctcgctggcatctg

SEQ ID NO: 364 - DNA, 115 bp, Mus musculus
  misc_feature (1)...(115): n = A,T,C or G
actgagggtctggcggagagcgccctctatcggcagcggctggaggtcatcgctgagaagcggtngctgcaggaggagatcgnctgccgcgcgtcncgagctggaggaggagaaa

SEQ ID NO: 365 - DNA, 272 bp, Mus musculus
  misc_feature (1)...(272): n = A,T,C or G
gatgagatctcaactgggangaatccatcctggactcaactctcananccngaantagaactaaatatagangtgtttgntgnctctgtggntncngccagagaggaagaggccctagaagaananagcntncnantctnangtctgggccagctgcatgccnaacacntgcaggaagcagctcaaaatgtcaggattcatgcatggtcatctatgaaatagcataaangggtgtctattttggaactcagggactcttgtgtgaacaacgt

SEQ ID NO: 366 - DNA, 317 bp, Mus musculus
  misc_feature (1)...(317): n = A,T,C or G
cttctttttgtcatgaaggccttgtttgggggcccgtgganatgactcantcggtgaanccttggaggtatgaggccctgangtgtgctgtgtgcacacanacanagacnnnccccaacgnnactcactccatggacntgatggtcagacagggataaagaggcgctcctgtgctggagcacangctgttctagctgaaganccatcantcaccctgtggaccggtactcctgcttcacgggctctggcgccctcgtctggcctcagtgggcactgcacataaccctttacttatattngaaaataaaatatttaaa

SEQ ID NO: 367 - DNA, 408 bp, Mus musculus
gactgagctaggattctaacagcaggcccagctgtccctgtccttggggcttgcagacaactggatagctgagtgtgtgggtccacgagatagcttggaaagtaagggtgtttgctgctaagcccgatgacccagaattcacattacaaggaaagagaaccgatccgcaggagcccgtgtctgcatgcaggactctgaaaatatgaagctttacctgagcagagcgttcacaggatttcctctttgtctctccatacccaaaatactaaaagagggttcatgcctcacttaataaatgcaggctgggcagactttatacaggacctgcttttctaacagcagccaccaggtgagtgtgagtgttgcattaggaataaaacatatttggttgtgtgactaaaaaaaaaa

SEQ ID NO: 368 - DNA, 197 bp, Mus musculus
  misc_feature (1)...(197): n = A,T,C or G
gaactgagagcctgcctangtctaaggngaagagactcagcattagctgcnctgacaaacgaagnctcagaaacacccatcataaactntgttctctggttaagtctcatgangaacattttatncaagcatagcaagctgatanagggaaaatatgaaatataaggtgtgaatatcanagaggtaaaaaaaaagaa

SEQ ID NO: 369 - DNA, 502 bp, Mus musculus
  misc_feature (1)...(502): n = A,T,C or G
tgagcggacctgacggnctgtgcggcagacctggcaggaagacgcgctgcagctgcgctcgcactcggcttcacgcaagttctacttcgtgactccggacactgactgcattctgtggttgcgtgctgcagcccctgaagacaggatgcgcttccagttccgcttctttctggtttacagcctgtcctcggccatccggatcaccgcagccacccaggccactgcggccacaccaacaaccaaagcatcctcccgcgacccgtgcgcaccgggctcctacctgcaattctacgacggcccgcaagaggcgccccgggccctggggcctccgatctgtggcctgaccattccagccccattcacgtcctctgggccctggcttggcttgcgcttggtcactaggggccgccaaccccgggtggactttttgggcgaggtcacctctttccacctgggtgggttggggctcatggatagggagaggtgaggagggatagagcaa

SEQ ID NO: 370 - DNA, 131 bp, Mus musculus
  misc_feature (1)...(131): n = A,T,C or G
agtcaccatggagatgctgggaattgaaactangcctnttttttttagcagggggngncagcagccgncntctccaccacaaaagttntaaacataaataccctaccgnttcacaactgcacctggcgcgc

SEQ ID NO: 371 - DNA, 102 bp, Mus musculus
  misc_feature (1)...(102): n = A,T,C or G
gctggacaggaccacaccattgctgcctttaanaaacttnntnngggctgaaggggatgcctcagtgnttangaccatcaactgcttttacgaaagttccga

SEQ ID NO: 372 - DNA, 444 bp, Mus musculus
  misc_feature (1)...(444): n = A,T,C or G
gactgagcctgggccccaaggcaggagactcggtttcaggatcagctacagggagagttccagatcagcctgggccacgagagactctggaaccagaacaaatcaaagcagnnccttnctnttgnggntntcttncngtgntgcnnttttncaggacnctcncagnctcncagtcttttcngtgaatnatcctgcgagacctnctanttngggtatcaaattaacttcatgcccngngnctcttgnnggaagannagnctattgnccactancctacgtncagggcaaagggaaactgctgngaaaacctggcangtcttgtcnactgccaggantgctgccaacaaaggagaaagggcctgtcaagccctccccttgcgctctgnggagacagacagctcaccttgggtttcctcagacacatctgngggaagctgaagagtg

SEQ ID NO: 373 - DNA, 115 bp, Mus musculus
  misc_feature (1)...(115): n = A,T,C or G
agactgagccgtaccccggcccctgccgggtccttccncgtgtccatgtgcccagctgtgcttgnggaggtgctgagctggnaggacttctctgaancnaactccagccagctac

SEQ ID NO: 374 - DNA, 137 bp, Mus musculus
  misc_feature (1)...(137): n = A,T,C or G
agctttatatggcagtacacgggcctcgagcacaaagntttagacctctgnncctgangaataacaactgctgnnctcttgcgagagaacaanacccttagttcgctggttctacttcccttttaaagaaaaaataa

SEQ ID NO: 375 - DNA, 278 bp, Mus musculus
  misc_feature (1)...(278): n = A,T,C or G
gactgagcaggggactacgctntcaccaatccganncctanncgtgtcaccagagagcctcttgggcctgaagagtagctctcctttcccctcaccttgctgtacctgctctctaatgggcccaccaagatgttttcaactcgccttaatttgtgacctttgtttgttgttctgtggagctacaaaaacttcataaaactgcgtccatgttggaacgtacactgngaagnaaacttaananatgntgcgtgtctcaagcctatggtcactcacaaagg

SEQ ID NO: 376 - DNA, 188 bp, Mus musculus
  misc_feature (1)...(188): n = A,T,C or G
cgcccgggcagggcttgaggctctgcactgnantatntgagcagcgaaccaaggtcctggggaatcatnggaggaaaatcttcagaattnnncntggntgctttgctttnttcngnctcttncctggcaccattcaaaagtagggagggaggggcttgctcttcctccttccccacccctagttgaat

SEQ ID NO: 377 - DNA, 150 bp, Mus musculus
ggcaaccttcccagcctgcccctcatttccatctgcttcgtagaacaaagggagctggacaaaggtggccccacgtaccttctgcgagggtgcataactgaagtcaatgaaaagcgactaaattaaaaattatgttttacaaaaaaaaaa

SEQ ID NO: 378 - DNA, 261 bp, Mus musculus
  misc_feature (1)...(261): n = A,T,C or G
gaatatggaagcaaggaagagcnttcacattgaacaatagaatcactgagtattcgtcgtacaccatgtccatgatatgatgatgcccgaggacttggattacctncccttgnntgttgtccacagagattcttcancaacataaactgnataggattgcaaggaagaagcttgtccatgaacctctggnaatgatcagtgagattgctaatgagacatcctatgttaatntntggaaaaaaatttgccaccaacatccgg

SEQ ID NO: 379 - DNA, 197 bp, Mus musculus
taaggaattctctgcaagcctggggatgcagtgttccacactcaatactgctgctcacggggacagatcgttctgctctgtgagtctcagtgtctctaactcacactgaatagttcttcatagatgtagatttgatgatccctgttaaacattgtattatgaattaaatcacaaatgactactgaaaattaaaaaaa

SEQ ID NO: 380 - DNA, 289 bp, Mus musculus
  misc_feature (1)...(289): n = A,T,C or G
gaactgaggcttggatacctgaacatttggtcttgtgctggaggctctgctcaggaaggttatggggcctttatgaagtgcagccttgctagaggagatgtatcactggagatgggctttcacagtttatcgttttgcccccacantctctgctttctgcctgtggctgaaggtatattctctcagcttcttcatctggcctcctccaccatgcgcgtcctcccaccattacnnactcttcttctggaaccataagcccaaataaagtcttcctttcataaaaaaaaaa

SEQ ID NO: 381 - DNA, 298 bp, Mus musculus
ggggtctttaaacttgatgcgggtgcggcgcggcgcgggacgcacagggctgcgcgactccgcctgggacgatcccagtgccttctgtaacgggcgggttgctgtaggaaaaaacaaatccggcaagcctttctttagcaagttgacccatcctttcctttgcctacgcgagagtctgcattggttgccaagggatttgaaaccgagaagagaggacattgataattactgtcggtttttaattatatgtagcattgtgcttttcaaagaacatacttattgtttgcaaaaaaaaaaa

SEQ ID NO: 382 - DNA, 522 bp, Mus musculus
  misc_feature (1)...(522): n = A,T,C or G
gactgagtcgaatgtggagtctcacagggactctcctgtactaaggctatgggcagtggatgaggcaactgggatccccatggaatgaccttgtgccaggctctggccagaagatttgctgccacagatgaaggagcatcagggaaagtatcgtcttacctgcccgtcccccccacttgcgccccaaattaacatgtaaagctgaggatggaccttaaaaggttcctgtcatcccctagtatcggtagagggttagtcacttgaggagcagaagcaaactatcttatttaagtgtccggcatattcagatactacgggtctaccaagtctacactgtaaagaagggcttggccctcatgggaatcatccatccattatacaacggtataagggctttctggggtccttttgtcagtaactagctggcactctatgaggtatgttctattaatgaattctggcttaattattcttttaaacgtttgagttttgntttgagatagagctctggctggcctaaaa

SEQ ID NO: 383 - DNA, 231 bp, Mus musculus
  misc_feature (1)...(231): n = A,T,C or G
cagcatgctaagccggaatcacancctatacctgctnaaattcaaagncccaatcttttccagttcacccangcatctcaacnttcttcnccatggcccagatacctnagcagccaanactccaaggagttacaggctttttcagtgtgctttatgcagttgtgagtaacatgggggcagctagtgtgacttagcattgncagtaactactcagagacttttaaaattgta

SEQ ID NO: 384 - DNA, 228 bp, Mus musculus
  misc_feature (1)...(228): n = A,T,C or G
tggaggaagccatgaagaccctggagctaggccagggtacttgagtgaagccaggtnccagtcattggtgtctcccacctggacacaggttacgnngggggccaggggntgggngngatttttaactttggtacattccnaccanaatantnnctgggaaccctactggggcantctgaagggnacacctcttttnccangattnttattctaacctaaataatacca

SEQ ID NO: 385 - DNA, 123 bp, Mus musculus
  misc_feature (1)...(123): n = A,T,C or G
cactgaatccttcacagaagagtcatnnncnnngatgtgangntggagacctacaggaacctcaatgctgtaggctacaatatggcgaagaacatagntatncgaacgaacattcgtcaaatg

SEQ ID NO: 386 - DNA, 153 bp, Mus musculus
  misc_feature (1)...(153): n = A,T,C or G
cgctgcctggcacacngaagagattangggatgagtanggactagnaactgnactgccacagcgcangaattaggtacnnacnntnagtacagtaacacccacaactactcctgaaccttgtaattaaaggaaacaaaataccaaaaaaaaaa

SEQ ID NO: 387 - DNA, 105 bp, Mus musculus
  misc_feature (1)...(105): n = A,T,C or G
atatctactgccgagaatcgacgaannncgagctcaggtacccggggatcgaagnncctatgcggaagctccnatnctcnagaatacacagagaaaccctgactt

SEQ ID NO: 388 - DNA, 155 bp, Mus musculus
  misc_feature (1)...(155): n = A,T,C or G
acaaaactagtccagaganagctgaaaaagcaaanntaaaggcaaggtatcctntcttgggacgggngnaggnagggtcaagaatntttaacgaaaacantgcngaaagggccaannanannttgactctgggggactacaagatgggccgaaag

SEQ ID NO: 389 - DNA, 116 bp, Mus musculus
  misc_feature (1)...(116): n = A,T,C or G
tatgacttttatcagtantgganggaactagaanttttgtnctngcagacaccngtnnggntgaacaattgtgtngaagagtttattagattaaaaacatttgctatcttcccaaa

SEQ ID NO: 390 - DNA, 138 bp, Mus musculus
  misc_feature (1)...(138): n = A,T,C or G
tgaatagggggggggcctccnccntgacctcactgcngctatggttacctgcacactgtcagggccangagcaccncgcnnnattcccancattncnntgaacgaacagngctaattagacttggggaagaaaaaaaa

SEQ ID NO: 391 - DNA, 500 bp, Mus musculus
  misc_feature (1)...(500): n = A,T,C or G
gcactgttcttcgttgggcctttcagccttgngcagctactggggatgcggcaatgcctttgcctangcgnagggncctgncactgatacatcttcncaccctgancgatgntgctggttctgcnaatctcactcgaccctganagtacctggaggccttntctcagcctcccgttttatcctgtgactgcctgggagannagnctgctttattgantnncttcctgggngagagtgggaaggaagagctcaggatctagagntagctatncatcatggggggatcaagagagganctttnaaaggncttagtttttgcttcctgctggtgcgaggaaatgaagccnagggtttgcgaattgtaggcaaatgagctatacccccatcctgaggaacttttgtcttcacggcaganaacattttccaggggtattctgatttggagagcatanttggagggcntcagcttttaaaaattttggaagccggaaaaaaaaaaa

SEQ ID NO: 392 - DNA, 376 bp, Mus musculus
  misc_feature (1)...(376): n = A,T,C or G
cagatccgacattacctgcncataagtgcctgtgtcccaagtngtntgnncganganctganaatgnnntagnnagnnatnacgctntgganancntatcttgccngtnacacagnaatgactctagaagacannttggtggaggannagatgttttgtgcatggggnccttgaggaatacttnagattgagtcctgttcccgaaacctgtcaactgaagcccaaccccaggggtacctgtattnggaaatggccctcatgggggtaattacagtcaagggatattgaggatgtgatagagctggtgnccttccagaagaaaagagaccagatatcttctgttcatgcaaggtnatgcgaggccacgtcaagaaag

SEQ ID NO: 393 - DNA, 347 bp, Mus musculus
  misc_feature (1)...(347): n = A,T,C or G
tttgaggcaccatgcaatatgggttgaaaatntcaantaatccantactgnanccngctgnnctgnatangatcgatncganncacaggactctttaaacctctatcctctgtggtggctgctaaaggtgagtgctgagacatcacctgcggatgcctgtgtctgctaacagcatggtagtgcagaccaagtctcccaagatcacttgggcccctggccagcaggatctgattttgaaaggnggntgagcttccattcccccacccttcagctgangtgtcgngacaaatcttctctgaattgctttttattaaattgctagtgtaaagtgggaggaaaccataaac

SEQ ID NO: 394 - DNA, 205 bp, Mus musculus
  misc_feature (1)...(205): n = A,T,C or G
gtttttagcacagtagacaaacctttggacgtacctatttacaccagaaggtcataaatactagctgtttaccttacgctgcttactcgattagtaaacctggggaggacccaatgtcaacaattatatactgtntgatccttgctgcattatattacccttaacactcaatttttataaagcattacagaactctaaaaaaaaa

SEQ ID NO: 395 - DNA, 267 bp, Mus musculus
  misc_feature (1)...(267): n = A,T,C or G
gactgagaaactccctanatgatgagtcccactgcctgtagctaccactccatctacccagagatgattgagcttcccttccataaatccagacccagatgtgcaactgcctgtcaagtgtctccaccagagtgtcacccaggtcacttgttgtctccacacagcccctcatcttacagataatgtcctcaaaagacacattctgtggaggaagactgtgaaaaacaaaaactcccactgggtataaagacattggagaaactccga

SEQ ID NO: 396 - DNA, 257 bp, Mus musculus
  misc_feature (1)...(257): n = A,T,C or G
tccagctcatcttccatgatncccgggattgctatgacnggtcagcagtttcattgacaaaaggatcctcaccctggacaaacaggaaacacaaatcagcgcacagccagacaggcccagtttatgagctctcgttttttaggaagagtctgcgaagcagcacactacactgtagactgcagcctttgaagcttcaggttcaagtgtggtaaatttacttagaataagtaagtattctactcatgacaaaaaaaaaa

SEQ ID NO: 397 - DNA, 114 bp, Mus musculus
  misc_feature (1)...(114): n = A,T,C or G
gagtgtttaagggcgggcngggggccnattctcagtttacctcactttttagnatgtggcctcctataagaggantgancccaagantgaccagccctgacgtggcaagaagaa

SEQ ID NO: 398 - DNA, 156 bp, Mus musculus
  misc_feature (1)...(156): n = A,T,C or G
acttcactacactttgcaacagccgcggcggcagagcagcgtcaagcttcgtgagcaaatcctagatttaagcaaaagatacgtgaaagctctggcggaggagagcaggagcacggcggatgtggacagcggcgcgtncatggcaggctatgctga

SEQ ID NO: 399 - DNA, 373 bp, Mus musculus
  misc_feature (1)...(373): n = A,T,C or G
gagactgaggctgtttttgngttgcttgacgtgttgatcctaggacatagancggagaacaagaagaannctangacttaactnatgaagaatcccctatttgccatcttatgactagcatggnacatgtanttagaatcatatgcattatgggaaaggtcaggccaatcaaaatggagaacccagtcagtatgatggcctggcgcatacacaagtatctgctgacctgatttggatccttgaaacccccaaggtccgaagaagagaactgaatcctgccagttggcttttgacttctacatccatgtggtaacacacatgaaccctaacatatgtgcactcaaattaaataagtgtaaaagaagatctatta

SEQ ID NO: 400 - DNA, 230 bp, Mus musculus
gactgaggttttggatttttgagccacggcgtctaccctgaacagcccggaactccttgtgtggctgaggatggccttgaactcccgaccctcacaattccaccagccccttggactgatgcgtggattgtgatcatgcaccaccacaccaagttcacaaggcaccggggatcgaatccagggcttcatccccagcatcagtcattacaagaggcaggagagaccgtacc

SEQ ID NO: 401 - DNA, 230 bp, Mus musculus
  misc_feature (1)...(230): n = A,T,C or G
gactgaggtatttggaagactctgctgntgagngtgacttgtactgtgcagacctggcccaagatgtctcagngaagaagaacttcagtatctggcctagagactgtttttggtgaagaagatggttcagacccttgtctgaagagtctacctgagactaaagtaaagagatttatattaattacattagcaaaataagtcttanaaaaatcccagcagagaaaaaaaaa

SEQ ID NO: 402 - DNA, 119 bp, Mus musculus
  misc_feature (1)...(119): n = A,T,C or G
gtatgtagaactctgccctgctctctgcttactgcatggaagtttagaaataaaaccagagtgtcttgtcatttagnatttaagaagcaggaaggaggtgctgtgtgtgtgtgtgtgcg

SEQ ID NO: 403 - DNA, 227 bp, Mus musculus
  misc_feature (1)...(227): n = A,T,C or G
cgggtggaggccgganaaaagaccanagtccattaagtgagggaggctgacngaccaancagnngtacanngcnactactnccagcaagaccttcaagaggacttaaaagctactctccatcatgctcttgtttctctgtttacttccacctccgctaccaaccagcttactattttcctaatactctaggttctcaaatcttaaaactgtattcaaaacaaaaaaa

SEQ ID NO: 404 - DNA, 124 bp, Mus musculus
tgaaagagcatcagactcgaggacactcactcatgtgccctgtggtcaagactgactgcatttctcatctgtgatattacttggcctttgaataaagttccttgctactttgtaaaaaaaaaaa

SEQ ID NO: 405 - DNA, 109 bp, Mus musculus
  misc_feature (1)...(109): n = A,T,C or G
tgcgcctggacctgaangngaaggnctatagtcccagcttctcaggaggacanggctgggaggagttccgggtcactctgggaaatctagagactctcaaaaaaaaaaa

SEQ ID NO: 406 - DNA, 123 bp, Mus musculus
  misc_feature (1)...(123): n = A,T,C or G
gagggagcccatcctatggagccgtctagagnctgccgtcntgcanctgnggtggtggaggangggctcgtgncgctgaggcgatgnngatcatganataggaggccattctgtgctactagc

SEQ ID NO: 407 - DNA, 257 bp, Mus musculus
  misc_feature (1)...(257): n = A,T,C or G
gattccagaagagggacacaaagnctgtggaaccggagggacggnaaagctgctgnaagattgcatctccttgaactgtcagggaaactacagctatgaatcccaacattcatttcttaatgactgttgnccacaagccaccatctgctcttgtttggtcagcctcgggtcctttccatgtaaggnttaacactatatcaattttcttcttaaatccatttnaagaaaacnggaaagacccccccaaagaaaaaaaa

SEQ ID NO: 408 - DNA, 291 bp, Mus musculus
  misc_feature (1)...(291): n = A,T,C or G
tatatctaggtgaggcgaccganactgctggattcctttgcgaagggccangcctttaggctgaacaagtaaccttccntgtggttaatagagactggaaaaactccttccanaactctgaaggggtgagcttggttntgacagtgggcacttatgagccactgatgtatgccaagctntggacctangagntnnaaagcagntntnattcagnnacagtatagctttaggggccaagaagattccattgctccaaaaatactcaaacttgggacagcttcctggaagagg

SEQ ID NO: 409 - DNA, 111 bp, Mus musculus
  misc_feature (1)...(111): n = A,T,C or G
tagcatggctcttacacagaangagccaccctctgntcagacagcttntgntagccttatgnnanctggaaagctcctgggaggcataacgggggggggggcttaatattc

SEQ ID NO: 410 - DNA, 424 bp, Mus musculus
  misc_feature (1)...(424): n = A,T,C or G
gactgaggtggggtctttcngctactatctggcagtcgtatggcttgnagctcacaatgactgtgcttagagacatgggcttacaggagctggctgagcagctgcaaacgactaaggaagagtctggagctgtggcagntgcagccagtgtccctgctcatagtacagccagaacaggacactttgtggaccancacaggcnagcactcattgccagggtcacagaagtgnacggggtgctggatgctttgcatggcagcgtgctgactgaaggacagtaccaggcagttcgtgcagagaccaccagccaagacaagatgaggaagctcttcagctttgttccatcctggaacctgacctgcaaggactccctcctccaggccttgaaggaaatacatccctacttggtgatggacctggagca

SEQ ID NO: 411 - DNA, 162 bp, Mus musculus
  misc_feature (1)...(162): n = A,T,C or G
tggagtggcttttcctactnaaatttgttgacaacatttctattctaaaatttttccagcttgagggatgagaattggcattttgttcaagttgagaacagggcatggggaggaggttgacaaggaaggaaataaaatgagagacaactaaaatgaaaaaaa

SEQ ID NO: 412 - DNA, 210 bp, Mus musculus
  misc_feature (1)...(210): n = A,T,C or G
tgccggggcaaaccccacagccagggggaggnctttgtggacatttccccttcagcctgctttgatctcctctggttgttggccatggtgccagccttctcagtttctccaccctcagactttttagcacgttccctgtattgacaccctgtttctcggaagtagaagctcttcttacaactgcctccaagcctacagaccaccttccgt

SEQ ID NO: 413 - DNA, 360 bp, Mus musculus
  misc_feature (1)...(360): n = A,T,C or G
ttcgagcgtcggacccggngatctaagttcctattcggaagttcctattctctagaaagaataggaacattctnnacctgcaggcatgcanaagcgtgngggggacaangnntccntnnnaaaaatatgaacatgcaanccttgtcggtggcttgcataatattatctgatttttcttagaaaacagccttangatctaaagttncattatggcatcttnatactnagttangacctgntcccctcagagctgcctcctacccacctaccctttcccttgnccttccctcactagcccatcttgccttcctgaacctgnncnatngcctattnncctcctncctaaggaggcctacccgt

SEQ ID NO: 414 - DNA, 124 bp, Mus musculus
  misc_feature (1)...(124): n = A,T,C or G
tgcacttacaacaatggcagnnatgaaattggacctccacgagaagcaccaagctccagctgtcactgtcatcgagtaagcctactgtgcctttcctnaagcagtnggcagacactcaccattt

SEQ ID NO: 415 - DNA, 292 bp, Mus musculus
  misc_feature (1)...(292): n = A,T,C or G
gaaccccaggagatcacagaggagagaataccgctcttcattggagggtaggcctacctctcatcttgagaaacgccagaaagtgactttggttccacatgacgccactgagcaacctatctngagacagtctgggaggaataaataacggggcgcagatcttatnttttttacggtcgggngctcacctcctgttccatcctaagncacaagattctcacantggaaagancccttcactggacngcggaaaggaccagatcccatccttatatggggacgaggggtcttc

SEQ ID NO: 416 - DNA, 265 bp, Mus musculus
  misc_feature (1)...(265): n = A,T,C or G
cggccttttcccctactgggaccacccactaatncagctntactncctggagttcttggaatcttccggaagaagggaagnctggtgtcaagcatctgcnaacttcancatgccagcanncagtccggcggagggagggatctgcngntggggcaaccagangaccctgccctaggcggaaataaagtgcaagccccgccccagtcaccccgcggngggaccccaggcagtaaaccccaccccattcctctggcaaaaaaaaaaa

SEQ ID NO: 417 - DNA, 190 bp, Mus musculus
  misc_feature (1)...(190): n = A,T,C or G
attagaggcgtgataccttgtggaaganntaaaaggtaaaattgtatttacaggnangtnngccttttataaagcctatcctggntctactgnatnactatttncatngnaccggggnctacctnatnttagaataaagagtatcattgaatcatccctaactgntcctncagatcaactatgaattggg

SEQ ID NO: 418 - DNA, 117 bp, Mus musculus
  misc_feature (1)...(117): n = A,T,C or G
gtaaatataggataanattctgactnccggagnngnaganggagatgggnagcttcattttnnacacaggcgngggcctaggaggcgtcacgaaaaagaggcctgacttcccaacag

SEQ ID NO: 419 - DNA, 138 bp, Mus musculus
  misc_feature (1)...(138): n = A,T,C or G
gactgaggtatcagtnctcaggncagnaggtttggtggcaaatgtactgtcccatcctgtncttncacgtgctcccacaactcccagacaagggaccactatgtagccctaaagttcttanatattgacttactaaaa

SEQ ID NO: 420 - DNA, 199 bp, Mus musculus
  misc_feature (1)...(199): n = A,T,C or G
tcttgcctttgtagtggccncagagntcctggncgatgtgacctccagagaccaacgntgtcttttnttttganaacaggaacancanantcttaagcaggtctgacnttggattgcttccactcgcgaaggnanaaacnantggtcnctnngtacagagcngcttgaaataaaccttggtggtacctgcgatggtgca

SEQ ID NO: 421 - DNA, 139 bp, Mus musculus
  misc_feature (1)...(139): n = A,T,C or G
tccatagccaacatccacgtggcagctnacaagngnaaccccagtncctaaggatcccatgctntcttctgacctccaccagcaccaggcatgtgtgctacagagtcatatatgctcatacacataaaatatatttaaa

SEQ ID NO: 422 - DNA, 129 bp, Mus musculus
  misc_feature (1)...(129): n = A,T,C or G
ctttgcttttttcctgtgaaacatacntngncnacagangcgagcctcatnttntccatctgcaanaggagaaaggananaccacagcagcccccaaaggcttaanggttccactggaaggcacatggg

SEQ ID NO: 423 - DNA, 157 bp, Mus musculus
  misc_feature (1)...(157): n = A,T,C or G
tgctgcccaagcttgtctggctgngtgtagctcctacctcaagcngagtnggctttctcngctncctcaccagtgcctgacaaacagatgcattaggctngtgtcctcatngagagaggagaangacngagcagggatccctgggagtacagcgggg

SEQ ID NO: 424 - DNA, 150 bp, Mus musculus
  misc_feature (1)...(150): n = A,T,C or G
agcagggcagccagaatcacctancagaggagcantgaagatgancncaagacnangnangnccnggacagatacctaaagatgtatgcatctccccattcncgaatttaaagatnatgaacttagatttccccatttaaaaaagagagc

SEQ ID NO: 425 - DNA, 498 bp, Mus musculus
gactgaggcctgaggcacaatggagaaggaaagggagtgtccagaaaaggccggaagctggcatccagccggcggaggcaggcacgagagccagctgacggtcaggatgcccccgtggccgcggaggctgagtcctggccctctgatgctgatgcggagcttcaggacttcttccaggactgtggagccaaggaaaggggctttgttacccgggaggatctggcggtgagcatggggccctggaatcacacctggaatcctttcgtgcagattcttgaattttcctattctaaggcttagcttgcttgcttattccctcctgcatccaaattcactctcagatagtattaagaatttgtttataccaacacataggtgactgatgaggcttaaaatattaccctttcctggaaacatttgcattttaacaaaggagagaactttgtgccccagaaataactcaaatatagtgatgtgtgagtgttttaaaaaaaaaaa

SEQ ID NO: 426 - DNA, 121 bp, Mus musculus
  misc_feature (1)...(121): n = A,T,C or G
gcttaacggcaaggaanggagagcctgaaagtanagcnaggnanctacgcanaaagccacnccnggctacagaggctcatgaaccttncagaatcatcnaagaagacctgcccgtgcatgg

SEQ ID NO: 427 - DNA, 283 bp, Mus musculus
  misc_feature (1)...(283): n = A,T,C or G
tagtgggctggacctttctagtagcgngtgcnaagaaatcctacagagagangttgactatggtcatcaaatcttccctcagggntgggctttccttggngaatgcagtgaggctgggagagatcttctctttctagcctggcctttgctggctccccccatgctntgagtcgcccaagaacttcagctttcctagcaggctggggacagccncatctanttttctgtngggatacntcngcaattctcctnaagccagaangagngtgaacataccctgatg

SEQ ID NO: 428 - DNA, 342 bp, Mus musculus
  misc_feature (1)...(342): n = A,T,C or G
gactgaggctgagttcccctgggggaggagggctgcatccttcttcctctggtcggctaagggcttctgcattcatagagctgaacctacaaggtctgactgacaagaacggctccaacgactcagagtcctgctgtgagcctgagctagtgacttctctctactcagtccacaagcgccatagagtgggntcagcctnggttgtatctctncctanctgncatattacccactagggatgtctgcagacccagctgagatcctgnagcagagtaatggtgggccttcatctactgacatnaggactggctaaggngacaccaggattcccacagccctggt

SEQ ID NO: 429 - DNA, 375 bp, Mus musculus
  misc_feature (1)...(375): n = A,T,C or G
tgccactagcagccatgtanncttgcgccacagtagtgatcggtgntagtggaagaagcantatcagnngaacagaagtgccanagtacatnannnagattntattgagagcanncgtancaggaantaactgacctgttaagaagcaaccannccggggctgngccctgccagaggactaggaagcanagtcccatanagagaaggccacaaggggcccagagagcacaggtggngatgtctccacacccctagatgctggggactaagatggaactttctggtttctttaacagttcggttacatcgagtgatgtttttctggacgctgncttgngagaggcatgngacgttntactgaacataaacacttga

SEQ ID NO: 430 - DNA, 431 bp, Mus musculus
  misc_feature (1)...(431): n = A,T,C or G
gactgaggtgggcatggagcccagggctgtgtgggcactncaccnctgagctacatctccagcctccagctctctgctcttgagtctttnanatatattcccaanagggggntgctgngtcatagtcattctattnccttaggggannanggaaaanggnnaganacccanacagagacgaagaaacctanaaccagcaggtaccccagccacnctaaancccaggtgctcctcnnggaccggcattctcgaaatccttcactcctaggtcaagatccgnccccagaaacctcaccacccatttgnaccctcaaggctaccagcttcagctatttggacagaaccccttcattacgcaaaagagaggaccagaaggagactgtccagggngcagtccaggatgtagaaggngnggctgcttaaaaatttat

SEQ ID NO: 431 - DNA, 275 bp, Mus musculus
  misc_feature (1)...(275): n = A,T,C or G
agactgaggtgaggcganagagtgtagtgntttcacngtggaggagggctcacggatnggnagcnaagtgnnnacccttggnaaccgcntgcgangnggnacccagggtaantaagatccttanttgntcattcnntagacagattcgctggacattgtgcagtggaaatatttgaattagttttcacctcaactatttttgccttcactatggcttgaaattcacaccaagtttacagaaatggggtcacctactttgtaggcaaaaaaaaaaa

SEQ ID NO: 432 - DNA, 122 bp, Mus musculus
  misc_feature (1)...(122): n = A,T,C or G
attgcccagtgatagaagcccatttaagaagactacatagtgtctacttcggctctgngncntcggtactacaaggcacaactanantcgacancanaataaagctcagtagggtgccagga

SEQ ID NO: 433 - DNA, 148 bp, Mus musculus
  misc_feature (1)...(148): n = A,T,C or G
gtctgtctgtgcaccgngtacangcgnnggccgaaaganggcatcntatcacgcgtaggacttactagtagacatttatgataccggatgtcgttgctggaaananaacccaggctctctagangagcnggcaatgctctgaactgct

SEQ ID NO: 434 - DNA, 196 bp, Mus musculus
  misc_feature (1)...(196): n = A,T,C or G
gactgagcttggttccttttcctggcgaagcccagtagccctgagacagcttggactntgagactcattnctccacctattcctgatcgtatgatntggcgctctctagctctatgtantaaggttgaaccaggtngnattatnggngctntgaatgctgtcattctcgcactctcacgcttgctcaaaaaaaaaa

SEQ ID NO: 435 - DNA, 104 bp, Mus musculus
  misc_feature (1)...(104): n = A,T,C or G
tctatgacagtccaaatacctaaccctatgggactcctgtaagggtacagntganctgagggccattgcttccagctccaggaatcatcgtacgcaggtagata

SEQ ID NO: 436 - DNA, 126 bp, Mus musculus
  misc_feature (1)...(126): n = A,T,C or G
tgcctgtatgcacctgtgcccgtagcgcctgcgctatnagaatangacactgnaggcntggncctggagtacatgcattnngncagcntgcacctttgagccntcctctccagccccatgaatcca

SEQ ID NO: 437 - DNA, 108 bp, Mus musculus
ggattgacacggatgacagacaacctgccaaacttcagaaacctgggggacaaaatgcagtttctactgcagtgaaccttccttgagtatgaatcaacaaaaaacaaa

SEQ ID NO: 438 - DNA, 203 bp, Mus musculus
  misc_feature (1)...(203): n = A,T,C or G
gaagagaccaccacatggacagccagncagcnagagcaganntcacactgatggatgacatatgcccanaaagttcttcnattccatanaagttaanncatgctaactgtttttgataaatnantactttaanaggccattcnaganaagaagattgngttctcttatgctttggaagcctatcacctgcaagcaagctcttt

SEQ ID NO: 439 - DNA, 182 bp, Mus musculus
  misc_feature (1)...(182): n = A,T,C or G
gactgaggtaaaccctgcctgtggaatgcagtagtgattgacgctgtccacctcaaaagacgtcngaagcttcaaggaagatgtcccagggggactgtgctgtgaaacagatgaaacagtgaagaagagaagagttcgtgctatggcntacccatggacactgcctcccctgctatccgtct

SEQ ID NO: 440 - DNA, 132 bp, Mus musculus
  misc_feature (1)...(132): n = A,T,C or G
cgtcttccaggcagctnagatggattctgcttcttctaggcgagcncggactttgcanncntgncttgnggtgatgcanctgacncgagagacatttctgcncctgtaaggaacctcattaaaactcattgg

SEQ ID NO: 441 - DNA, 184 bp, Mus musculus
  misc_feature (1)...(184): n = A,T,C or G
acagtgaccaggtcaagactncggtgaagaaccctcgctggatagagacnntctgntactacttgntaaccagaccaataattaattacactagcaagccncctcttatgaagtncnctatcnngctagganttntttnctccaangggggnggattaaatatatacaactacgaaaaaaaaaa

SEQ ID NO: 442 - DNA, 160 bp, Mus musculus
tgaggatcctatacagtttatactgtactgcaacaaacacacattctcaggttactcctgggtatgacagtgtctgacttccctgtttatgatgacacaaagaacttgatcagcaccatcaagcattgcatagaatgttcctcaactggaaaaaaaaaaa

SEQ ID NO: 443 - DNA, 392 bp, Mus musculus
  misc_feature (1)...(392): n = A,T,C or G
gactgagggttcctgcaagcacctcgcttcagccctgccctgtcctcatcctccctgtcacctccccgaggggacagaccaagcgccagctgtggaaaacgatttatttcgggattagagttgatcttcccaagaaggcctgctccctcagggtgacagacttggagagcttgactcctggccctggatcctgccagaagaagctggccactggagtttaggacagctgaccagagctggntctnaatcactcacgtgcactgtctagngtgaagcaagcatgatgactgcccancaccctaacagacttctntacaattgggaccagagaaggcacacactgctcaaacggactgcacagaaccaggattcgatcctctgggaggatttgg

SEQ ID NO: 444 - DNA, 210 bp, Mus musculus
agactgaggcccagcaagaaacatggtcagcatgcatcggagctgcctggaagcagggacaccaccaggagctgtgcttccaggagaaaaggtcatagtcttgaaggccataaaaagagatacacaattgctcaatatcgcatgaatcttgttaatattcgttaatattaatgaaatataaaatgagcacttatacctcaaaaaaaaaaa

SEQ ID NO: 445 - DNA, 289 bp, Mus musculus
  misc_feature (1)...(289): n = A,T,C or G
taacgagacccctgcactcntantntgctcngnagcagaggncagannnacngagacagaagcattcngnccgntntcctgncanacaaaaccccgangangccttctttnttcctggaatatggaccangaggagtcctaccttnctaaagcatgctggcgtgcctataatcacagcactcaggaggctgatggaggaatatctgggttagagtttagtctgggctctatcaaaggagtctcatctcaaaaagtacagaaataaccagccttaccaactaaaaaaaaa

SEQ ID NO: 446 - DNA, 141 bp, Mus musculus
  misc_feature (1)...(141): n = A,T,C or G
gaactgctccccaccgtngaacatggatgntggctatacacgngtctgntgttcagaccttgncacaggagccactgcnaaaacatcaaaacagaagatntcccaagtgggaaggaagagctaacggtgtaaaaaaaaaaa

SEQ ID NO: 447 - DNA, 261 bp, Mus musculus
  misc_feature (1)...(261): n = A,T,C or G
gacttggggcgcttggngctgctgaggaggaggaggaagaagaagaagaagaagcaagtcaagtgggccaaagttccaggcaccccagttctaggagcagagcatctccagacctgctctccctcaggttgccaggacaccctgaaggcccatcaaagaacaggcaaagcacctttatctgccttccacaccccacccactctttcctattagctctcagctgtgccgnggaactcagtcattaaagagtgttttaagcca

SEQ ID NO: 448 - DNA, 212 bp, Mus musculus
  misc_feature (1)...(212): n = A,T,C or G
tttcctcattactatgnatntcagcttaaatgccattngcncntggatagaatgttcgccactacaactaattcctnacnntggnnnggnngctgccanttttnanggtttgcntggttgcctgcctctacccctttgatcactagctgcntccnggggatgaaaaanagctttggcgctaagcttntctgctatttctaaagaaaaagaaa

SEQ ID NO: 449 - DNA, 143 bp, Mus musculus
  misc_feature (1)...(143): n = A,T,C or G
gaggacatctacgtactgatannatatgcctgccctctacccatnctatttttaagatagcagactgattggtatagcataggccaaccttgaactcaaaaactttctgttgcaatacatttttgtgaattgaaaaaaaaaaa

SEQ ID NO: 450 - DNA, 132 bp, Mus musculus
  misc_feature (1)...(132): n = A,T,C or G
aagaggcaagcaggagatggacctgntggactntganntncaggactccatgacttgnaacnanattatgtgccaagncngaatngcntanaaattctcagtttataactttcttttgatgaggcgtcagac

SEQ ID NO: 451 - DNA, 107 bp, Mus musculus
  misc_feature (1)...(107): n = A,T,C or G
actgagaagagtctttctatacagtgntggctggcttggaactctccatctcacacctctgcctccactgggattaaaggtgtgcactaccactgcccccccccccc

SEQ ID NO: 452 - DNA, 152 bp, Mus musculus
  misc_feature (1)...(152): n = A,T,C or G
gctaaacagccctggcntnagngaccctccactcaagctactctttgttntgtataccttgnntgttgaaactgggactccctgngcagccngactggctnggagctnaganacaaagaccaagctggtgcaaantcaaaacacattgcttt

SEQ ID NO: 453 - DNA, 172 bp, Mus musculus
  misc_feature (1)...(172): n = A,T,C or G
agttaaggaacctgtatccttaggnggaacaccacagtggccgctcatctgccccattantgaacgacacaaccgtgcagggagagtccctaggtcctgctgtgtaataccgngccttaaagganggctgcctcttctaaggactgaagagtagtaattcgcaattaaggtg

SEQ ID NO: 454 - DNA, 190 bp, Mus musculus
  misc_feature (1)...(190): n = A,T,C or G
agactgagggctatctcaagtaggcttccgacctagatacaaaatacatcggagaacccttctcaaggaagactttatcaactatgttcaatatgaaattaatcttttggagctgatccagagaagaagagcaagaannaagatattcatttaagaaggatgagattggctattctatggtacagtcggg

SEQ ID NO: 455 - DNA, 117 bp, Mus musculus
gagactgattcaagagtgagcccctagctcccttctcctgctgccatgcctttgctctgtcaaggacccctggaacgggaagcctaaataaacttttataacttgcaaaaaaaaaaa

SEQ ID NO: 456 - DNA, 101 bp, Mus musculus
  misc_feature (1)...(101): n = A,T,C or G
cggtggctattgggaaatcctcaaacttcggntaagaagnggccttgcccnaanaaagttgcntcagaggnaccgggcaggantaggcagcctactttttt

SEQ ID NO: 457 - DNA, 151 bp, Mus musculus
  misc_feature (1)...(151): n = A,T,C or G
aagtacctgtgcctagccctgagcaccaggacatgcangataaagactctgaagtccngttctccttcgnnacgnnatgctangancatgggcttngtctatgcatatnactgcaaaaacagactaccctangnggtagtatggtcaggcc

SEQ ID NO: 458 - DNA, 125 bp, Mus musculus
  misc_feature (1)...(125): n = A,T,C or G
tgtgctgaaacagcatgactcggnggatgaagatgtttgttaccaaccctgangncctagacttccaccctgaagccccacagtaggtncngggacaagctgcaaagcctctgacttccacatgc

SEQ ID NO: 459 - DNA, 149 bp, Mus musculus
  misc_feature (1)...(149): n = A,T,C or G
catgacttttgccaggacggactttcctagctgtgtgcaggcgggtaatgggagcgtctaacaggccataaatgcttaagtgctttgtttcgcaggcattttcagtaaaggtcagaataaattcntcttcccttaatgcagtatttata

SEQ ID NO: 460 - DNA, 153 bp, Mus musculus
  misc_feature (1)...(153): n = A,T,C or G
gactgagatagacaggaaaatcaagaaagatgtctaagntaaggncatanagttcatgtatctatggtntaacgagaaattgttttaaatgttcagatatctaaaaaggattntctaagataaacttctggttttgtattattctaaaaaaaa

SEQ ID NO: 461 - DNA, 181 bp, Mus musculus
  misc_feature (1)...(181): n = A,T,C or G
gactgagggctgggganctcaaaaacactcttaaaaggaaggcgtggtgncttgntcctgtggctcccagcacttggnannatgatgcaggaggattgctataaggacctccnatatggcccaaagtganacctctgcctcancgtntctgcctnagnaggncctgacaaccttgtaaaga

SEQ ID NO: 462 - DNA, 149 bp, Mus musculus
accaagcctagtgatgatggcccatattcaattccccaggactcacatggtggatggagagtgccaactcccagttatcttctaacccccacatggataccctggcacaggcataccctggtacacacaggatgtatgtgtgcacatat

SEQ ID NO: 463 - DNA, 267 bp, Mus musculus
  misc_feature (1)...(267): n = A,T,C or G
tgtgcggcgttgggtccctgattnnnggtnatgaacaactccctgagattgttaagttggcnnngagagacagnagtcaaagggaagagatgagaaagggttgattagatggtcacaaagctgtncanctctgggaatgcaactcanaatngcaaacnntaaaggccgngtacaatcaccaaattgnaactttgcttgaattacaacatactgttgctagcttcctggcttgtaactgaggaaagaaaagattctgatgtgtaaaaa

SEQ ID NO: 464 - DNA, 297 bp, Mus musculus
  misc_feature (1)...(297): n = A,T,C or G
aggtgagagacccttgtttctgncnanatgncgagancagntactgggcctnncanntagctgccgagcctgnccacctgagtcccatcactgtgactccaccgggtggagaaagctgacttctgttaagttggcctctggcctccacctttgctaagtgctcgtgtacatgcatgggcaagcacgtgagggcacacacacacacacaaatgtaactaaaatgcttgtaaagntacanaggatagagatagagagctcaggggttaagagtacccagnggtcttgcagaggacctgg

SEQ ID NO: 465 - DNA, 224 bp, Mus musculus
  misc_feature (1)...(224): n = A,T,C or G
ttccaggaatataggatggctaaccattaatggaagggaaagcataagtctatcgtccattatggaggcagccttagcagacggagaacctgacagatcttcggtgagtagtttaacaacactaaataaggatatgtcatctacagctggagagtgctgatataagccagactttattctaaagcattcattgaaagcaaaagcttgntgctttggttgcttgg

SEQ ID NO: 466 - DNA, 145 bp, Mus musculus
  misc_feature (1)...(145): n = A,T,C or G
ggcagtatattccaccacaccncagtgccccttaccgaagcagtcgntcctgnggnctnggaagattanntcggnactcacccgttgtntggggattccgggcctttgcgggatntggcnggnttgcctgcagaggatattgttg

SEQ ID NO: 467 - DNA, 132 bp, Mus musculus
  misc_feature (1)...(132): n = A,T,C or G
gactgaggaaggatcgggtgacagttcaagacgagnaggctgaagcattgaaacagaaggaactggaacaagaagcaaaacgcatggctgaggagcggcgcaagtacaccctcaagattgtaaaaaaaaaaa

SEQ ID NO: 468 - DNA, 208 bp, Mus musculus
  misc_feature (1)...(208): n = A,T,C or G
gagaaaggcctgagctggtcagatgactnggctggataangatgnttgttaccagccctgatgncnngnnanncaccctgannccccacgtncnaggagacaanatgntagtctctgacttncacatgcatgcactttgnannaagtatgcaacaccccaccctaccaatgagagaatggatgaataaataaataaataaatttttat

SEQ ID NO: 469 - DNA, 302 bp, Mus musculus
  misc_feature (1)...(302): n = A,T,C or G
aggacaccgtagcatcttggtgatggnagnaacagaaanagtagctgncatgngagtgctgaaaagcggaactccatgttntctgcaggagcaccnagnnctattanncaccgagccaagccgactnctcagcntccacattcggaacattgtntcanccgtgggnagagctnggattcatggggctggagagatggctcaaaggtgcagntgtcnttttncatgtgannncnggcaccagggactccagngncctantctaatncccacaggcgnacacngccacaggagcatacaggcat

SEQ ID NO: 470 - DNA, 300 bp, Mus musculus
  misc_feature (1)...(300): n = A,T,C or G
ggggaggtactcatctaccaccgttntgncagctgtttgaatgnanntnttcatcaaacntggccacangccattccacatagtcaccaacatcccagagacagacctggaccgactacagattttaggagccaagngctttactgacgagtcactnctgngacccaacaataggcttntgaccaccctgcctcagcatcttagtgctggaantacngagagcaccaccatacnnggnttatgcnacgagagtcccagccttgccacgaggcggaagtgactgagctgccacatccttca

SEQ ID NO: 471 - DNA, 103 bp, Mus musculus
  misc_feature (1)...(103): n = A,T,C or G
tgagactgaggaacagctgctggtacagncaccagcatggtaanagctacanagggccaggctgcacttnctcctcccaagtccaatggagcccattgcagca

SEQ ID NO: 472 - DNA, 195 bp, Mus musculus
  misc_feature (1)...(195): n = A,T,C or G
aggagggattactaagantgaccaatccacagactgcctngcantganctnancntgatagacaccttatctcctttacttctaaccagnaccaanttcntnnnanntgntaagnccgctcttatgtagaagactatnatgctaggaatgatgctccaaagacncaggattaaatatatacaacctacttaaaac

SEQ ID NO: 473 - DNA, 284 bp, Mus musculus
  misc_feature (1)...(284): n = A,T,C or G
gactgagttttgaaanggactcttttatcagggagtagctgactacgatgttcggcctcttctacctgcctggcttgatgtttgtctgcacatcaagttccctatccatcatggcttccatggtgctcagtgtgagcctgcaggtgcatactgacatctcctgaaggcggcctcctgacaagtgtcacaccggctgactgcatcggggaacaccaagtgtgaagcactacagagagccaaaatgaatggtaaaggagatttctttgacacgctaaaaaaaaaaa

SEQ ID NO: 474 - DNA, 210 bp, Mus musculus
gactgagtgctgagactgacccctgggcctgctgtcctgtgctaggcaagtgatccctgcactgagccatacataccccagccctatctttgatcatcccaacaaatgagacgcctggatggtaacaacttcggctttggggaaggtggagcggggatctttgtggagaaactttgtattaacatattcaaatatgcatcaaaaaaaaaa

SEQ ID NO: 475 - DNA, 294 bp, Mus musculus
  misc_feature (1)...(294): n = A,T,C or G
tagcatcctggacaggggccataattactncttgcggaactactcaaaggtcaccacanncaagnatggcnngnntccatatatnnactgcctcgaataagatgaatncanagctcaggtacccangngatcgaagttnctatncggaagttcctattctntaaaaagtntaggaacttctcnacctgcaggcatgcaagntgngggggtcgatttttttaaggngggngggctgtttaaagggagaatcgaaggcggggtcnaacgaggangttttaaggggggagaagacag

SEQ ID NO: 476 - DNA, 105 bp, Mus musculus
  misc_feature (1)...(105): n = A,T,C or G
gcaccctcctgagacgaatntttctanagggacattngagacccctctctttgcctgncannctactgaaangatgaacgnnaagaaattacgggccaggtgtag

SEQ ID NO: 477 - DNA, 118 bp, Mus musculus
  misc_feature (1)...(118): n = A,T,C or G
gactgaggattgctctctgcagacganaactcnaggacncntgctgnttgtgtgnnngcgccaaccanggaatgacactcccctccttctccaaggctgcctacctctctataaataa

SEQ ID NO: 478 - DNA, 130 bp, Mus musculus
  misc_feature (1)...(130): n = A,T,C or G
aaacattctgcttctacttgtaaccagaccaatatcaattcacttggaagcnccnnnntcttntgtagnagactatcatgctagggaatgtttgcttccaaagnggcgggggattaaatatatacaacta

SEQ ID NO: 479 - DNA, 130 bp, Mus musculus
  misc_feature (1)...(130): n = A,T,C or G
ttgcaggctcaagtgatcattaggcaccagcctcccatttcagtggtcaaccttgncagcgtgtcancanagatcccaagannnggaataacagaaaattggaccccattaaaaaattttttttaaatga

SEQ ID NO: 480 - DNA, 260 bp, Mus musculus
  misc_feature (1)...(260): n = A,T,C or G
gactgagatgggatctattatggagtaaatcnngtcaacactgcgtagcgantctgttaacagncangctganngcccggccacgagtccggcccctgttgactttcattcctctgaatgcccaggagaaccatgggctggctgtgcccaccccgtctgtcccagaagattttgcagacaaagaagtgggaggtaagagaactctgatcttgtggcttcctttcatccctgctggggccctgaagttaaaacaaaataaa

SEQ ID NO: 481 - DNA, 224 bp, Mus musculus
  misc_feature (1)...(224): n = A,T,C or G
gagcctcaaccttaaaatgcattgnatattcccatcttgcccagtagggacggtagagagcaatggcgcaaacagggtgctattgcggtctaaggctaattaatcnctttacctctctgggcctgnntccccttatgttatacaaccagcagagtctagttcgtgcgntgcgncacagcctgggctacagggtgagacccccatctccatgaattaaataaatt

SEQ ID NO: 482 - DNA, 402 bp, Mus musculus
gactgagatccctctcttctgcagcatcaaatggaaggttcatgcactcatcaaagccagcagaacaaccctccatcctcctgctgctcatggagccacgctggagtgtggcacacattctgaagtagcagaagatgaggttggcgagctccaccatcacatcctgcatggccctgggcatgggacacaatggtggaatctcaccatgagttcagttccactgtctgcaagtcggaagctgtactctttgactgtatgtatattcatttcaaataaccacatccagaagcagctctaggaaggtgtaagagacatacggaaattgccagactcgtaccttaattatttggcacagccagttgcgagtttaggaaagaaaacaagcacatgaaggaaaacatt

SEQ ID NO: 483 - DNA, 354 bp, Mus musculus
  misc_feature (1)...(354): n = A,T,C or G
ctgagactgaggtagaaganagagaatagcaataactaacaanancangaaggaanaagacgacggagnangaggacgaggacgtnctntactatctatcagaccgnngngggcctncggntnaatngatcaacctctctccctctcaaaacaaatccttnccnngggccntgcaagatggctcactagataaaactaannctnntttgctttnncccttgcccctcccttcacctgntttntgaacctttntactcccanccctgggcacactcaccactctctgaacaccccatcctgaatagtttattttctctctacccaccanagggtgtncncactttcttttcctct

SEQ ID NO: 484 - DNA, 189 bp, Mus musculus
aaagccccacactgaagcacattccatggagtgagagacacagagattagaaccacaggaggacgaagactgcaggagcctatctgtacgagtttgctgacgacattaagctatacacccttctccaagtactgggctctttagaaacatccaaccatgaagggaaaaattaatatacaaaaaataaaa

SEQ ID NO: 485 - DNA, 250 bp, Mus musculus
  misc_feature (1)...(250): n = A,T,C or G
gtcttgaggacccggaggcaatgnggtagctggaaagaagtccaattaanaccaacagttttctataanaaagtgaaanangngncnnnctgcngcgcggcaagccgggagtgagaggcagctatgacgtatgggcagatnggcngcaggacnctggnccctatcttccgccagnngccannagcaccgcccactcacggggaaagagagccacctantgagaaactgtncagatctcttttttcgcggc

SEQ ID NO: 486 - DNA, 195 bp, Mus musculus
  misc_feature (1)...(195): n = A,T,C or G
tttttttttttttactgggggcccagttagaagnaggngggngnttagaacctgancagtntngncnagctnaagccagtatcnncgggttaannnttcttttcaagnaggcagcacaggagaagaacctgctggctctgcggaccaggactccanacttganacaatgtntttcttagctcttattcccttttt

SEQ ID NO: 487 - DNA, 330 bp, Mus musculus
  misc_feature (1)...(330): n = A,T,C or G
actgaggttagtattgctgaggatgagaagatctgcagcaccaagtcaggtgcagggaaagtcctttaaaaaaacaagattcatacctccaggaagaagtaatgcagatgtgagtaaggagatcacaaagatgagtccagatccaaaactgtttcaggnagntcaacnaaggnggnnagnatnngntntncccctccctccctctntccctttctntgctannactaggtataggggcctnatgccttgctacctttccgactttcttcctcactcccccagncgtggttaccacgttnatcngccgccaatnntgccaggggcattgaa

SEQ ID NO: 488 - DNA, 163 bp, Mus musculus
  misc_feature (1)...(163): n = A,T,C or G
cgctgagttacacccccancntcagnnnatgtgtttgggttgggctgccagcccgagagctcccttgaagaaaaacaccaacgtgattacaatctgtgatgaatggcaaaaaagacgaaaaggaaactgaaaagaataaatacacttcaccttggaaaaaaga

SEQ ID NO: 489 - DNA, 152 bp, Mus musculus
  misc_feature (1)...(152): n = A,T,C or G
caaggtcaaggtagtgaaggactttcccccaccacggnggtgtcctggtccgtacctccgcccgggtgaggatgnaggcacctnggctctgctgatgacctgttcangccntcagggacnnntgtctccagccancctcacagacatgtcag

SEQ ID NO: 490 - DNA, 134 bp, Mus musculus
  misc_feature (1)...(134): n = A,T,C or G
ctgggctccccgtccccctgctnagtggncagtgaggaggagganatggactcacttntgaacnacagcgctggccccaccccatcctgaanntgnggaagacccagacgnggatttatttcgaagcagagact

SEQ ID NO: 491 - DNA, 544 bp, Mus musculus
  misc_feature (1)...(544): n = A,T,C or G
gactgagcagcacgaantcacatgaggaacctgtcttcctgccttccgaagngttnaccanatacgcanggantgcnnatntcctgttntcntatttgnggggcncccantaggntngactgacnntgcntgcangagcatgggctgagagactatttactggaagagtatgggtaatttaccagtggttataccactgaagagaacttctccccccctcccccccccagaaatcattacctgcccataggtcctcaggaggtttataaaaagattatcatttttacaagcagtaaaaaaggacactcagtgcgtgcgtagagtgaggaccccacacatttccctaggaaagcctggaanaatatgttagttgccatgaagacagtacaaggacttccctgggcagtcttgtaagctttgccggcaggaggaaatgcaatttttcccactgcctatcacacaatgcacccgaaggaattggaatttccccaggagttgcaggctgggtgaaggaacgggtctcagtgtctgtcaaaagaggatg

SEQ ID NO: 492 - DNA, 474 bp, Mus musculus
  misc_feature (1)...(474): n = A,T,C or G
gactgaggcctctgccgcacacatggagaactnaggcacttgncatccgatgctctactgtgggacttctcagagacaganggtcttanatnnctcctggntcacnnnacctcgntgtgacancncagcnccntcgttgatctgntgngagtgtgcacagagacnttatagaangaaanangttccttnatgccccctcttganncatggggtcangactctantgcctgcccannggcttntaatnnggtgaagangacctannngcaccagngctgccgccctcccctcnccngatnctgaccaanaagaagccnncgccatnatngctcctggngatgctggggctctggctgttttcagttcctctgcccccttcccctgcgcatatgttaaggggctatctccatggttccccttcacagtttgatggcctgtcacctgtatactgaaataaacctcactctcccctga

SEQ ID NO: 493 - DNA, 343 bp, Mus musculus
  misc_feature (1)...(343): n = A,T,C or G
gggctcagtcagaggctctgcccacgtgtgcacgaacccctccagcctcccccagncccaggagtggctgaaggacggagaacttacacgtggagattccggctcccaccaaacagatgaccttgcggcctggaacagangattgatggcacatgctaaggtttccctcctagacgtactgctggtgccgggcaggatggcattggcaacctnacgtttcaggatctcatggacgtcaggcaagcattaaattcactgtgcagccagccaaggatcaccttgaacttccaatcaccctgcttccatctttaagtgcccagcattgccatcatgcccagctaag

SEQ ID NO: 494 - DNA, 276 bp, Mus musculus
  misc_feature (1)...(276): n = A,T,C or G
aggttttggaaagcaacacganncaccatcacgttcatctgacacttctgacctaccaganatcacagcttccctccccgggacactgnagggacctggttgcttattgctgttgtcntacggntgatgacagagcagangatactctgctcatgcngnacnatactgaaactgggctggnagaggaggcnntgncccnggntananaangcaaaccttagtagagnngggntcactcaaccccttgtaaagtggggactgtctgtactgtggatg

SEQ ID NO: 495 - DNA, 189 bp, Mus musculus
  misc_feature (1)...(189): n = A,T,C or G
attcgtctccaagctaagngtctcacatcaggctggttagatggagattcaagtttgccatagcaccaagatcacttggaactgggtgtgcgccatcccacttggatctgttcatcaaaggggaagggaactgactaataaaggtcaaactcattagatttcaangnanaaactgggggggggggggtt

SEQ ID NO: 496 - DNA, 264 bp, Mus musculus
  misc_feature (1)...(264): n = A,T,C or G
gactgaggaagagagcaaacctcggtgctcaagggtgccacagactgccggagtcagggcagagtgctgcctagatctttcctctgcacactccatggatcaccgtgtctgtgcacccactgcgtgaagaggccctggagctgttgtttataatagagaatctctggatccaagatacctgagagggagcatgcagacagacagacagactccttccgtgactgatacaaggtcaaatataannctccaagggaaaaaaaaaaa

SEQ ID NO: 497 - DNA, 232 bp, Mus musculus
  misc_feature (1)...(232): n = A,T,C or G
tctttatccatttatcgccctggtagatatntactttanntccatacgngggggntgntataaaaattcgcccgataaacacgaagnggggggcatctctggttgctagggagatccctttcaatatacaccctggagngctatagntnngatcaactgggaaaatatatanttnattttaanntttagcatttaactatgnntctttactttncggatatattctgggaat

SEQ ID NO: 498 - DNA, 136 bp, Mus musculus
  misc_feature (1)...(136): n = A,T,C or G
gtttgatataatggtactgccntcgatcgatgaatnnaagctaggtacccggggntcgaagttggaactctcaaaggnccggacaggaagcatggatctactgcctcgaatcgatgaattcgagctcggtacccgg

SEQ ID NO: 499 - DNA, 351 bp, Mus musculus
  misc_feature (1)...(351): n = A,T,C or G
tttttttctacgcgtnctccaaacactgncctgantggagataaatctggatcaaaatcctggctaaagaagcaaaatcatagttangggcacgtnnaatggcncataccagatgatctggaancgaatggangnggtgcctccantgtagagaggcngatggntaactaaaaggagggatnccacaggngaggcttttcattggtnttattnataccgcaatgnaagggnacttttttttaatggggggnttttncgnactcantagtaangtaacccnctnacnnatgngncccattaataattcccaanaaaacccccttttgaacccncatttctaacaaaaaaaaa

SEQ ID NO: 500 - DNA, 148 bp, Mus musculus
  misc_feature (1)...(148): n = A,T,C or G
gactgaggagatctcaagcctcacaaacanaagngattcctntagtaacatgtnnaaacaacagcaacaacantaacaaaaacatgtcatcttgtctataggctgctctccatggtatgtcagagagacagatttaaaaacaaaacaa

SEQ ID NO: 501 - DNA, 298 bp, Mus musculus
  misc_feature (1)...(298): n = A,T,C or G
tgaaaggatgcccagtnngccaccccataagatcngatcatttntntnngnnanatttggctgcccactaganaagttnnnggttggncccttttccatnctgacttcnngaggcataggancttagctatagaanccctcaanctncgtnaggggcgaganggggcttggcaaggcttnttnccacccaccncaggggctcaggcacagctccaacctacngctttaattaaaaggccttttcaaaccattaacagcaataataataaaactctaaataggacccataaaaaaaaaa

SEQ ID NO: 502 - DNA, 152 bp, Mus musculus
  misc_feature (1)...(152): n = A,T,C or G
gcttacaacctgagcagctttgaaaagctaaagccanttcatgggntaagngntcttttcaagagacacccaccganaanaacctgctggctctgtggtccannactccagacttnaaacaatatttttttgccaagcaggtatggcctata

SEQ ID NO: 503 - DNA, 188 bp, Mus musculus
  misc_feature (1)...(188): n = A,T,C or G
tcgtgacttgttgacttanagaccttcctctttgccctccatcagtcntacncgtttccatagcngtatnggncaggtatnanannatgcttttccttacngctggacactcaactcanatcctcangtgctctgctgttgcaactccactccacccacgcntaggggaagnccttaatcccttttat

SEQ ID NO: 504 - DNA, 384 bp, Mus musculus
  misc_feature (1)...(384): n = A,T,C or G
ctcatgggaggccccaacgacccanccagtgaagcaggagaacctggcggttgaggccctgacgctcgactccccgtggcaccgcttccgccacttccacctgggcgatgcagcagggccacgtgaggccctggggctgctccgtgccctgtgccgggactggctccagccggaagtgcacacgaaggagcagatgctggagctgctggggnnggagcagttcctgagcgccctccctgcagacacccaggcgtgggtgtgcagcccgcccggccccanancnggaaaggaggctgttggcgcttgctnggaggagctctggntgagcanggaggccatggnggcccntggtgtggaaggggcttcccttggactatggtttct

SEQ ID NO: 505 - DNA, 179 bp, Mus musculus
  misc_feature (1)...(179): n = A,T,C or G
cagcgaggcgcgtgactcatggaagattgagnttctacctaatgatctnatcctccttaccctgaccactcaatgaccccatantttccngcccttnatnatccatnatnaactnaagacccttnccncagaantcnttggcaganatcnnanttgagacttaatgcaggtagctccag

SEQ ID NO: 506 - DNA, 108 bp, Mus musculus
  misc_feature (1)...(108): n = A,T,C or G
ggcatgttacctatacntantaagatgattcttgagatgactgcnggncttcctncctctgntgnaactttncttggagaancttttgcctncaaacctgatctgagg

SEQ ID NO: 507 - DNA, 270 bp, Mus musculus
  misc_feature (1)...(270): n = A,T,C or G
agacagacgtacatgccggtcgacnctcngatcntaaaacaagtttgagaggaannattaanatanaattattgantaaancgntgctntatggcnttatcacatgaccttaaananatactgcanagncgaccccnggaaganccaagggcagcagtgcaaacntttgtttgngggnncccgtattcatgctgtgcacatgtgtgtgtgctcacacacacaattcataaatataatttnnaataaatgagttacttaaagtaaaaaaaa

SEQ ID NO: 508 - DNA, 402 bp, Mus musculus
  misc_feature (1)...(402): n = A,T,C or G
gactgagatatttctagagccgcaaggtgactcaaaggatgagagcaggtgccatgaaagcttgagagccttcgcttctacaaaccatgcgaagaaagcaccggatgtggtggcacaaatctgtcagacctctactacgaagaaggagttacattctaaaggcngctgctgggtgaaaatgttactagaaagaagaagaaatacaccacagattcttcattagctctctanntgnatatcngnggnggactcgtnacgtatcttgggcgtatcatttaacttggagaagcnnnaggcatcataganaggccacctagatccagtccagtcccttttgtcatgaaaggaccactgagnccagcacccaaagcacacgcagnaggtgatttttcattttttttt

SEQ ID NO: 509 - DNA, 141 bp, Mus musculus
  misc_feature (1)...(141): n = A,T,C or G
aagtagtagcctgggcaaaggccataantacttcttgcngaactcncaaaggtcnnacaggangcatggctggttccntagtcctggcanaagtaganggagctgtctgaggctgaatnaacccaaataaccagttctatg

SEQ ID NO: 510 - DNA, 102 bp, Mus musculus
  misc_feature (1)...(102): n = A,T,C or G
tgattttgggcagatgcagtcanatttangagttcaaggatcannctgntctacggattgtgatccatgacagccagagctatncagagacaccctgtcttg

SEQ ID NO: 511 - DNA, 333 bp, Mus musculus
  misc_feature (1)...(333): n = A,T,C or G
gactgagtgttattgaacattgactgtgcagacttcagagtttaccaagtttgaggggctggccaaatccttctggacttactgagaaaggaacagacccaggacaccgactggagctacacggtgggcgccatggcgccaggccgagacacgtggatccttcggctttgcttctgtgtctcagctacctcagaggtttgctgtggaatcactagtattttaaacaatgcanacgcaattacagttgaagcacattctctaggagaaggaaaaggagattggcatgtagaagcttcattaaacttttggccttttcaaagctaaaaaaaaaaa

SEQ ID NO: 512 - DNA, 385 bp, Mus musculus
  misc_feature (1)...(385): n = A,T,C or G
ggactgaaggtggccggaggctacagattcagaccgttgccaagggaagaacaggcgcccncaanacacgatcactagtgctgcggtgaactcctggactgggcagtcttcactgttctcatgaaaccagtccatgtcaagaatggaaaaggcaacaccaagttgngagaaagaccacttcctcaacaagaaatccagctgtgctatcttcacctcgttgcagaccagaaacggtggttcgggttgtgtattggttcaagcccgagccagctttgattccctgtagagcagaactggacagaggtcacacctgaactggacgtggcactggctacatttttattaaaaccaaacaaccacnattacaaagcaaagcttttccaca

SEQ ID NO: 513 - DNA, 397 bp, Mus musculus
  misc_feature (1)...(397): n = A,T,C or G
agactgaggcccctgtgncccagaaagaanctctgaaaagtnnnctcctgnnaatatgtcaagtctctcaaggacagctntttcggtagaagacagaaganggtctaacctgagaaagcacaaggcagtctctatgctgaagaagttaaatgccagctatttggtcacngggaagagaaatctcctccgtggctgtgtggactcccgaaaactgaacagaggagcctttctttggctctcgtgaagacttctgtatgtgtgtgcaaaacagtcaagtcaggagcgtctagaaaaatcatggccttcagngcctggcagacctatgttcaaaacttaacttgttttatttcactaacggtgtgaatntggaataaattattctctgagcctcaaaaaa

SEQ ID NO: 514 - DNA, 293 bp, Mus musculus
  misc_feature (1)...(293): n = A,T,C or G
ggcttacggggggggggnccccattccccttttgaccaggnccagggaccacantncacttttggggttanaaattgggnggggcttaanaannccngttaacngngagcctttttgaaaancncgggggcttgggnttaacttncttttaanatacaactttnaaaacnaanttcccccggggtttcaagttttntggcgaatggaaagggccggtttaaaaccccccaaaggacncccngggcaaccttcctggnaatngggggaaccccgggggtttgccccaaagggaa

SEQ ID NO: 515 - DNA, 117 bp, Mus musculus
  misc_feature (1)...(117): n = A,T,C or G
gttagcacggagtctcgagaggtantatnactgatgtccntgaccngngacaggttgcaancatgaagacangattccttgtntagnaagggaaacacttatactttgggatgagga

SEQ ID NO: 516 - DNA, 101 bp, Mus musculus
  misc_feature (1)...(101): n = A,T,C or G
aacagcaaaacatctcaggcngncaaaaaaaatgaattgtgancttaaccatttcntntatgccacgnanggcgtaaattcctaatgatactgctcaccca

SEQ ID NO: 517 - DNA, 304 bp, Mus musculus
  misc_feature (1)...(304): n = A,T,C or G
cggccagtatattttgttggaaactgaaaagcaacaaaatgcccagcaccccgacaaggatctgaagggcttanatccttcacatcctcttaaaaatcgcttgctgccaagatgtcagtacacacttcgcatagcagacacaacatcggaagcctggaggtttcttcttcacagaagatttcagcatccagtggcctcgtccacagcagccggctggaactgcacttgaaggcagatatgtcagagtgtgagaatcatgatccattcgtgaatgctggaagtaaaaccatcgacataaatagca

SEQ ID NO: 518 - DNA, 138 bp, Mus musculus
  misc_feature (1)...(138): n = A,T,C or G
gactgaggagctagtgngatgctgtacaccggccggtctgnctgggagancgngatgcagtatgtggccnanatntncaagtgctgtgtgacntaagnaganccactggctgctgcttgacctctagttgctacctgg

SEQ ID NO: 519 - DNA, 163 bp, Mus musculus
  misc_feature (1)...(163): n = A,T,C or G
gggaatggggcacccctnccccttncttaanaacnggtgtgacaacantnnagagttgagcctngatcaggactnaaaattattttttnaggggggggggngggacaatacgtcncntaccctncangngtgaataacccatagataccctacctaagagaaa

SEQ ID NO: 520 - DNA, 119 bp, Mus musculus
  misc_feature (1)...(119): n = A,T,C or G
aacggcaattaacgtnaattaacatctgacgctgccccctccctccctngcngtntcgttcaaccacaaaaggnttnnnatattgttnttttgaattctnaaagagacctcatcttgat

SEQ ID NO: 521 - DNA, 113 bp, Mus musculus
  misc_feature (1)...(113): n = A,T,C or G
ttttttcctctgtgtgtcctggaantcactgncggggaccagnctggccttgaactcacagagatntnctgcctcagccttatgngngctgggatnaaagaagagtaccacct

SEQ ID NO: 522 - DNA, 284 bp, Mus musculus
  misc_feature (1)...(284): n = A,T,C or G
ctctggttgctctggccaaannaatngaagtcacttttgctcctgtntccattcgncgagtagcagctgnaagcgcggatcatgacatgatcnaanatngcaagagtnggatccctnactanttacangctaaagantaacacagacgcccttgttcaaggttatgacccnagagcttncaccagcngatggaatattcgattaatgatgatcaacattaanaagctaaagttcctaacacacacaattatgtctgctacaaaggccaaaacactttgcaccca

SEQ ID NO: 523 - DNA, 153 bp, Mus musculus
  misc_feature (1)...(153): n = A,T,C or G
ctggcagctctgctaacactgatgngaccatacatccactgaggcagctcatgctaataatgagggaccatacatctgctgacactgcttaannangtatncatcttanccntnatntangacntaaatttgatggngaggaccatctcactg

SEQ ID NO: 524 - DNA, 112 bp, Mus musculus
  misc_feature (1)...(112): n = A,T,C or G
tttttttttttctaggnttcctgcctggtgcatntgccagggggccggcttctgatggtnanttnctcttnanatggcagagacggtagaagggcctgcccgggaagtgaca

SEQ ID NO: 525 - DNA, 475 bp, Mus musculus
  misc_feature (1)...(475): n = A,T,C or G
gactgagatttctcagcccccacngtttagtacanccctcantnannngactcttcaggagnncntannaacntactttatgananaatgngacctagagtatgttctcgttgaanaacagcagcttacctaaattcaaatcttcacatgagacagttctgaactatgacacagtttccgtggaacacaaggacctggcactcttcagactgcattgggaagatggtcgggngagcacagtgcttggngacagagcagatcagcncaaggtgacgganagagaagacagagtgagtgctgagagcaggaccccagagaaggagcacatggacatgcggcatgacggttgcttggcttatgncctccatacctnagggaccacggggacaccgaagattgncagagngccccatgcatgcatactgcctaatatccagcacttccggagggcctgnccttggaatccttcctggag

SEQ ID NO: 526 - DNA, 117 bp, Mus musculus
  misc_feature (1)...(117): n = A,T,C or G
ttttttttttttttttttaaaggtgattantacatgagactacggnatgnnatcctgcagacgccanctgccgtgcagggcnnccgtatcccaggctctttcttgcagaagcaactg

SEQ ID NO: 527 - DNA, 104 bp, Mus musculus
tgattacacttttagacaatgtgttaatcaatgaagtaagcctgacccacatagtgagtgcctgtgcaatcagaacacagtgaaaccgtgcctaaaaaaaaaaa

SEQ ID NO: 528 - DNA, 317 bp, Mus musculus
gactgaggaggctgagactcgtcctctactggagaaaaacctaagctgcgtgcacagcatgcctggagtcttcaagcacagcaaattcaaggccaggctggtgcacatgaggccatgttttaaagggcgggaaagacagtgcctgtgcctttatccccagtttgatctgcagctggaatcaacatggtggaaagaaagaaccaactgccacaagttgttctctgattccctcttgtgtgccctttaggctctcgataagcaagcatgtcacacacacacacacacacatcacactaataaataagtgccaaaattaa

SEQ ID NO: 529 - DNA, 179 bp, Mus musculus
  misc_feature (1)...(179): n = A,T,C or G
gactgagattgcccaggcaggatgacccataatntggttccaggaaacaaactgatgtcctgcnatttgctgagcacacccctgccgcancaccagnctgtataggaccagtcaaagggcatgagatggctgaaaggataccagggtggcaataaaattactctcaagcgtcaaaaaat

SEQ ID NO: 530 - DNA, 397 bp, Mus musculus
  misc_feature (1)...(397): n = A,T,C or G
gatagacccatcctcaacangccctgnagagtangagctcagncaggctcttcatctnctcgcncatcctgnngtccacagntaccntgacctntgacctttntgcattcaaagccagncaggtggagcttatgctggggagattcaggaaggacacacaacccagcaaaancagatcccacacctaatcaggntantgcaaaaagccatgngcccntcgnnctaacttaatctnancccaaccncccagancagggatnagatcagttggatctcttcanctatcaactgtgcgtctttcctatcaactgngtttntntactctctttcaangnncggccaaaatgnacntcctccaggaagccttcccttataccctatagaaaacagcccgcgg

SEQ ID NO: 531 - DNA, 368 bp, Mus musculus
  misc_feature (1)...(368): n = A,T,C or G
acctctctgaatagcaccacaagcntttttanncanntagntacncaacgaccacccgngccntcagtgncaaatccacctctagagagagttagtctgcacaagagttaatagccctganccgaaacctgnaagactcttcatnaggtggctggctgagcgtgctgtagactctgtttgttggagtcccgctcaccaatgaaaaggaatactctgataccctgatctactcagcagcttggatggatctccagggagtccgaatgagagaacaganccagtccccagacacctgcttccgatgcagcacccttgaaaactgccacttcctagaggcagagccatgaantgagggtttctggaagcaa

SEQ ID NO: 532 - DNA, 428 bp, Mus musculus
  misc_feature (1)...(428): n = A,T,C or G
tggacgcgttgacgttctacagtagagatgaacgaccatttatttaaacagttacctaggaagangcacacctgcagatgcctcctggatttctgcttggcacactggcccgngccacccttgaccccagatgcccttccggcatgagttctgacttcctctctggcatctactctgaggatacttggcctgtttncctcctnttttatttgtcngngggncctggctgccgnttcagctccctctaatccttttggtccttcagagactccagacagatccntnccttnttttaactatatctcctttnatgatngcaagttttcancaaaggagttcaccaagcccaggggccgccattcatcttagaatcgaccagncccaggctcagngccaattgagagctactcntggagttaggcacccca

SEQ ID NO: 533 - DNA, 339 bp, Mus musculus
  misc_feature (1)...(339): n = A,T,C or G
atgtccaagatacactgaccgatgagcctgnnagagctnctgagaggactgacaagagagctgagtcttcggtgancagcgagnacatcngtgatctaacgtcaaggnaacatagtacaggcggaggagnccaganagccagcagcattgtgcctctaccctgcagggtgnggcaaagatcggtgtggaaagntgagcnangccggcacacagaccaacacacactcgtcgagatgcgacagnttnactcntgggaggtatcgtttngacntagatttgnagagaagataatgcgnctgaaccctatcanctgggacaaataacttggaaaaaaaaaaa

SEQ ID NO: 534 - DNA, 326 bp, Mus musculus
  misc_feature (1)...(326): n = A,T,C or G
aggcctgtacctaccctgcatgtgctaccagcccttacctctgcagctttcatacagcaccgctcactgtgtgtgagttacgggacttgcagacggtctctataatgggacattctaccatcatctaccataccatacctccgtncccaggtcttcctctgcagcctgacccagagcaccaagcacgggagggcaggagcagtttgaacctgtttttggtttnacatagacctncataacaagaaacatgacggatccactgantgtgttnaaacttgcatttgtatttagcacatgcaatatcaccccaagcaatttaaatacag

SEQ ID NO: 535 - DNA, 459 bp, Mus musculus
  misc_feature (1)...(459): n = A,T,C or G
gactgaggtatctaaagacagtgcctttcgtaaaccaggctggcctcaaactcactatggagaggacgatgattttaaaggtctgttcctcctgactccacaagagctgagattgcacgggtgaaccgccacgccagtttgcaggatgttttggatggaacgcaggacgctgtgcatgctaggggtttcgcgcatgcgtggagcatctttcatgataggattaactgagcaacatcgccagctccttccttcgtcagaatgcttctgaaacatagttcagctgtggcatggcttcgttttccacacacttctccagaatagggttcctcaggagagtatactgcctagtgtgtgtgtctgtgcactgcatgtagtgtttgcacacaggaagactcatnggcacaggcacttgnggagaccagagcttgacttngggatgactttctccacccttatgtt

SEQ ID NO: 536 - DNA, 121 bp, Mus musculus
  misc_feature (1)...(121): n = A,T,C or G
gacacactagaacgagggcaccagatctcattgtgggtggnngncngaaagcccagngtgntagntganacnctctacacaangcaggaaggnactntaactcaaagagagaaacctgcga

SEQ ID NO: 537 - DNA, 145 bp, Mus musculus
  misc_feature (1)...(145): n = A,T,C or G
tgagacttaccacacagctgcctctaccctggncagncaaggtaacatngaagaggaagcccagncagtgataatgtganaatatggaaggcgatggcnagcanctngtttttttntnnanagggggagccttactgtgggaaac

SEQ ID NO: 538 - DNA, 151 bp, Mus musculus
  misc_feature (1)...(151): n = A,T,C or G
tgaggggctccaggttagaacaagtatggagctnagaacctgngtagnttngannagctaaagncagttcatgggtgaantgntgntcttcaagnggcagacaggagaaggacccgctggctctgnggnccaggactccagacttgaaaca

SEQ ID NO: 539 - DNA, 135 bp, Mus musculus
  misc_feature (1)...(135): n = A,T,C or G
attttttttttttttntgaaggctatgtggggaccctgggggagcagcngacnggacagcgtcagtgcagatncgctantacnaaaggcntncggngacccatactgngcgtattntggatgagtgtagctgtgg

SEQ ID NO: 540 - DNA, 107 bp, Mus musculus
  misc_feature (1)...(107): n = A,T,C or G
gactgaggccgacgtgaagacgaaagnggaagagctcccattttacagtcaagataaagacgagtaataaaaaagagctgtgaagatacagaagatgaaaaaaaaaa

SEQ ID NO: 541 - DNA, 368 bp, Mus musculus
  misc_feature (1)...(368): n = A,T,C or G
tcttggaggaccaacanggaggatagcaggacctacatattgagatgaacgcctgngataagatgggaggacatcccacaggagaaccagtctgtcatgcagaggagtgnngctgtcttggcgaccnacttgcaagggaagcncaggagatntgagggtcaagctgaccgatttcananctgnggcnagagctatcaggcccnnaaagcnatggatacaagntgctgtncatttnnactcnccagttncactggnccaggatccaccagggatngaactgggcccanggtgnacacacnatggggaccggnctcanggcnnccgagagaancttncagaggctaccnccggggtgcccatctttgttg

SEQ ID NO: 542 - DNA, 254 bp, Mus musculus
gactgaggtccccaagccgacagtgtatgtgacaagattcccaggaaaagggaagagactcggctcttgggtgcatgcagactgcctccctacaccaacctaaacatagtggttgagccatatagctaacaggtggatgctgtttggacatcagcaggtatcagttaaagcgctgatcaccaaggcatgtggtctgtgagccccctctatttcttttccctggaatataaatttctcataaagcgaagacaaac

SEQ ID NO: 543 - DNA, 128 bp, Mus musculus
  misc_feature (1)...(128): n = A,T,C or G
tctgcttcctttaaatgagagcttcntcttatacagantgaggataaagacaaggatggagcatanaccggggtcccttncttggggaaagagnataaccaggtggcncttntcgagcctttggaagc

SEQ ID NO: 544 - DNA, 113 bp, Mus musculus
  misc_feature (1)...(113): n = A,T,C or G
tttttttttttttttnttgttttttnaccaagctgggccgggggcaaccatncgagctacacccncgaccctcccttncgttcggntgcgncantaaaccagttgtgtctagg

SEQ ID NO: 545 - DNA, 338 bp, Mus musculus
  misc_feature (1)...(338): n = A,T,C or G
gactgaggtctactgngtagcccangtcgctctcaaactgangatcctcctgtttgggctnncacattgctaagtattacgggtgnngctaacgatcacacagctgctggagatggnccatataccgncnnagaaggntcacnntctgaatgatcactggcngcccctgtgtntgaggaactggaaaccgagatacnctgcanngcaggtgctcttancaggaacttgttnagttcatgnntaactatacnacgctgnccgggganaanggctgcncaagaaacacccctgtngaangaatccaaggatctaggntgggctgtgtttggattacaaaa

SEQ ID NO: 546 - DNA, 117 bp, Mus musculus
  misc_feature (1)...(117): n = A,T,C or G
tttacaatactgctaagncagcatcanctattgaatntgganttacaaaacnagagaatgttnccaaacccncnccatatgnctataaacccagacatcnatcttgcaaggacttag

SEQ ID NO: 547 - DNA, 233 bp, Mus musculus
  misc_feature (1)...(233): n = A,T,C or G
gttgaggagctgacaccntanggacagatctttgnagcctggcgntnaccagcnannagctacntactgnccatgcnctactgcnctgaagactacattggagaggctggagagangnctcatcnannctangagcagtggacccaggttcaattcccaggcccgnatgacaactcacaacntncctaactccaggtgtagaggttctgacgccctgagacagacatgcatgc

SEQ ID NO: 548 - DNA, 229 bp, Mus musculus
  misc_feature (1)...(229): n = A,T,C or G
gctgaacctgaacggnacttngnctgttaaactgacggacgngacnacgccgggcnggtannntgggaaaaactcggttggctacgtgtgtttngaaattgggtacggttgggngacngagnaaacntgtggtggtatacgcgcggtacgtaatcgaaaaatgtgtcgcngacacgtacgacgngcgtatttggnggacctccggaacgatcggggtggtgtgaaaccg

SEQ ID NO: 549 - DNA, 115 bp, Mus musculus
  misc_feature (1)...(115): n = A,T,C or G
gctgaggaaactttcncagcgcttgtacngagcaagcctttccctntggacctgcnacactnacnttngatatcnntcaactttgacagtccnactttactaaataaaaagacac

SEQ ID NO: 550 - DNA, 221 bp, Mus musculus
  misc_feature (1)...(221): n = A,T,C or G
ctcaagacccatgtagaccnggtactaagcccnnaccccttccttcatggntgggggcngacactgntgncannaccnngttnanaaaaacctctcntnttcanncannancagaacttctttctgtgaaacctcctgagccaggcttccagaattcaaatgaccctcagcaacaaagtctcccatatccctacgagggtggcccattaaaccccacagaa

SEQ ID NO: 551 - DNA, 201 bp, Mus musculus
  misc_feature (1)...(201): n = A,T,C or G
actcacatctggaacatccctcacagcctgnaacantgtttanaggggcaagaagcacttcatatatgtacctaaagaagatctactttctttttttattttgcatncttctccacactanananctnactttgnaaacctatcnnttngagantgnncgtagactcttggngnggagagaagccttctttcctagcgtct

SEQ ID NO: 552 - DNA, 264 bp, Mus musculus
  misc_feature (1)...(264): n = A,T,C or G
gactgaggggacgccagcctggcacagctgagcggtggaagaggagatctgtgtctgccatggacagagggctgcttgtcctgcaagcctgggatgnttgccactggcccctaaagaagggttcgttggactgngttatagctgaaagtcaaaggctccatgactcttgcccccttctcatcagaatcaagggctagaggctgctccctatcgcatccttgccctatgggccactacaacnggaatctgagtgaaaaaaaaaaa

SEQ ID NO: 553 - DNA, 187 bp, Mus musculus
  misc_feature (1)...(187): n = A,T,C or G
tctgggcgctggtccaagagtgnatncgagccaagtcactgcccatnctgtgncatagcaatgaggcgatcggccaagcaacaaatcaggtgctgacacnccnngcttgaggtgtatataaagcagcaccatttttccaggggttcgggggtcttcctcctgatgaagcaataaaaggtttgctatt

SEQ ID NO: 554 - DNA, 281 bp, Mus musculus
gactgaggctccgctctcccgctgatcagggctcatgtcagagaccagatttcgagtggggagatggatctgatcgacatcctcagaccagaattaacctgctaaaccactggatcacttccggcctgctctggtgtaagcaaaatgcggcccctcttggcttgttgagaagttatcccaatagctgaagtatttgggggtgcaaataggaaaggggacaaaaaggtttcattcacatttatcatgttctttaacataaaagtactatgaaaaagaaaaaa

SEQ ID NO: 555 - DNA, 111 bp, Mus musculus
gactgagccagacactctcaccgactcaacgtcatcctctgtgaccatcactgttactgatactcagatagcaaaaacggactgctaatttcacaaacaataacaaaaaaa

SEQ ID NO: 556 - DNA, 522 bp, Mus musculus
  misc_feature (1)...(522): n = A,T,C or G
ttttttttttttttatggctntnacatgaaggcgctngggggtngaaaaccgnaggaccacaccttccacccnnctgtcatgagaaccggagaagaaacatgctaaatgcttagcactgggcagaggaggtcttctgtgactcgtcccacatcagggcagatttcttgaaaggtcccggtggcagagacctgtgaaaganggcccggggccactcacctgactgtgaattttttntggctganntgctgcgggatatntttcctttggggattncaggcangcnaaacttttgagganncgattagactgaccccnaggaagaggaggangancnaagaggagngaggnncttttcgaccnaagctncggcagcccgtgctggaaggcatgtggnaagggttaggagncatcactgtgctnaaaaccaagaagtctgngccagncanaactctgatcttctactcataagacctggagtccttnatnnnnacaggancgggctctcggctttttttataagg

SEQ ID NO: 557 - DNA, 105 bp, Mus musculus
  misc_feature (1)...(105): n = A,T,C or G
ttttttttttttttttgggctgaggtagtagcgctggnngggggccatnattacttnttggggntctnttttggtcggacaggaagcnnggcctggttccatata

SEQ ID NO: 558 - DNA, 424 bp, Mus musculus
  misc_feature (1)...(424): n = A,T,C or G
ctttacagaaacttgagataaacatgnnctgatgatgagcaatatttggcaacacactcanancngcagcatatgaacctggtcttacaanacttgcagantgcatttnagtggagacagttgnggatgaanatatcaatccttctnccntatcgngaagatgnngagagcnnngaggntgcctcngnngtggaggctgacanccannnnaacntacagacaggacttggnngacgaacctctgncagncgagggnggcgtttgttcctaaagggagggatagagccaaaagctccaggaaatctgacccaaggaaaagtccagttttcagngatgaagattctgnccttgactttgatattggcaaattggagcagcagaccangatgcnnatcangccnccctggaaaaccaaggagaaaag

SEQ ID NO: 559 - DNA, 278 bp, Mus musculus
  misc_feature (1)...(278): n = A,T,C or G
taatggctgggggggggtgcctccagtggctcctatggtgggggccaccctgggcacagccgaataccagctcctggtggctctgcaccatcctgaggatttagaaccatttccaaaggngatggcatctcaactcaaggcttnagacttggntactctagctcagctggagngaagctgngacaaggaccaatcttatcccactctgnaagagcaccatgagctggncagcacgcaaganagatattntttgattactatgccagactaggacactt

SEQ ID NO: 560 - DNA, 186 bp, Mus musculus
  misc_feature (1)...(186): n = A,T,C or G
tgagccacaagagagcccgagtggagntgaanagagcagccatttttcaatgccagggaactacnagcgcgaggttagancgcaaccagnganctcctggcncgcatttngacagctccaggagtgtgaaggccncaagcagaacnacaagaatcgcggggancagctggagcgccaccagggctg

SEQ ID NO: 561 - DNA, 242 bp, Mus musculus
  misc_feature (1)...(242): n = A,T,C or G
gttggctaggctcaantctaacagccacgctaccgctgaccctancnngtcaacacaaacggtatctcttactcggggcatctaatttaattattctttaaaaaatattttttaatgtgaacattctaggggacattaaaatgacatcgaaatgaggagcctcttctgcgattcanaggtaaaaggaaatttgttagngactgntccattcaaagaanatganggcgcttgatggaagcgat

SEQ ID NO: 562 - DNA, 313 bp, Mus musculus
  misc_feature (1)...(313): n = A,T,C or G
gactgagagacctgcctgcttcgactgtgagaggaagcaattgccatactctgtgtgtgagtggggtctgncctcacctaggatgcagccacactgcaggcccttcagcttgctacccatgtggcagcagtcctcacagtccagactgggacccggcttctgtcttgagggcacagttggngtcttctntccagaaggctggcctctcttgaatctgctggcacaggtcancactgctatctggccggaagctcgtgtnacatgtggggtgctgggaanaactgttcttnaggtggnggctgaaaagggcacg

SEQ ID NO: 563 - DNA, 118 bp, Mus musculus
  misc_feature (1)...(118): n = A,T,C or G
tcaggacccttgagttctnaacagatctagatcanaggccgngtatnctgcgnagnanatgtgataacggccattttaccccaaattccgactctatanataaaactttaaggactga

SEQ ID NO: 564 - DNA, 174 bp, Mus musculus
  misc_feature (1)...(174): n = A,T,C or G
atcttgaaatgaagaagggcctttcangagggttatanagctgaaaggatggaccngacacacagtcacagcaacagcatggaagctggctactcaaagcannaatctgcaaagaagtcanggtttgcacgcagtgcttcagcccgcttttgnacacncttttttgaaaggggg

SEQ ID NO: 565 - DNA, 211 bp, Mus musculus
  misc_feature (1)...(211): n = A,T,C or G
gataccagctctaccagacaccatagccatggttagcctggnttcactctccancgtgcatggcagtactgggttgggcgtactgtgagaagctttatgtagggccaagctgcaaagagctagcatacngaaagaaaaaactgacttggaaggctganaggtacatggacaanagcgcagagngagctgaggcngggggaccccgaggggg

SEQ ID NO: 566 - DNA, 261 bp, Mus musculus
  misc_feature (1)...(261): n = A,T,C or G
ctcactcaccacacagaccntaacnacacagacnccagtgattanaantttggaacaaacacactgcttntgggangaacaggcttcttncctgnggggatcaggcacccccaaagcntnancctgngttaaccgcagtntgncacaccagccacggacaacactggtcagctttggggcttggcaagcagcacccctancaatgccatctcaagtggcagcacctcccaaccnagggggacangcccccactggtctttg

SEQ ID NO: 567 - DNA, 115 bp, Mus musculus
  misc_feature (1)...(115): n = A,T,C or G
aaccagacccccccaaagtnngtaagggggaacnacgacccncccaacggccaaggggaccaggacncntngccnagggcagagaaanncccaccggacgggaacgagagagaga

SEQ ID NO: 568 - DNA, 587 bp, Mus musculus
  misc_feature (1)...(587): n = A,T,C or G
ggacagatacagatgctgagctgggaccttgtcagcccgcctctccagagaacacgggggctttttgatgctgtcaagtgcacccactggggcagaaggggggccaggggggcctttggcccttggcttaaggctgtccagaagagcggtcacaggccccccagcaagctttccagcttcttctattgacctcaaaggcttttcaatttggagggataaaattcaaggattattggcacaagaggaatcttacgggggcccgatgaacattcggaatttgcttcccgggaaggcaccagaaacaaaagccagaaaattttaccccaaaggcaggggcttttggggaattctaccccattctggcatgggnccaaaacacactttgntcctttgtcttcaaaaacccaaaagcaaaaaaggggggngccctactgggttttcggttctggcccattccngggaacatnccgngcccagnngttggggggcaaggttttccttggnatcccttttannanggaaccgannaagccccaatggncttggaattcccttaacgcgggccctggttttttatgaaaatttgg

SEQ ID NO: 569 - DNA, 394 bp, Mus musculus
  misc_feature (1)...(394): n = A,T,C or G
gacttctggggagctcctgcttaagtcagactgagtctgaaaataaccaacgttggtgtcctcaagactnnaanggcacggaaggacanaaaaagcttgaacgactgctgtgtgctgaaaagagcggtggtacaccaggttcccaggancggttcaatgggagtcgtttcctagcaaaacacacagccaagggggaaagagtgcagcttttatcattcctctgtggacacagaaaagcattgacgaggcttctnctttgtgtcgacagtgtggataggatcaacccatgggccaggctttctttctaaagcctattatttgnatattttaaataagtatgtattgggtttaaaacattctgaaatataggatattgtatatttaaaaaaaaaaa

SEQ ID NO: 570 - DNA, 141 bp, Mus musculus
  misc_feature (1)...(141): n = A,T,C or G
gccgttgggacccccccccaanggttagggnacacggaagcccaggcagcccggnngggancagcnaaggtangctgaaaaagnccatcnaggcagacaaggctanggacnaacaccacaagganaatccggctatgggca

SEQ ID NO: 571 - DNA, 102 bp, Mus musculus
  misc_feature (1)...(102): n = A,T,C or G
ggggaaaccacagaanncggccagagcacagcccanggaagccctnggncccaccggngaacacccaggccngcccccagggncgaaccagacacccaggag

SEQ ID NO: 572 - DNA, 238 bp, Mus musculus
  misc_feature (1)...(238): n = A,T,C or G
cttataaatttaacttcttcacttttnaaacancntantnacattaccaaaccacctacttaaatncataaaacattnttccaccccaattcatatnacccccnattccnaaaccattnaactaaatactnaacttanaactataattcccctcacctaaattccntacttaccacnntttaaaaacccacctataaanctttttctaaccctaaccaacnntttttttttttttttt

SEQ ID NO: 573 - DNA, 273 bp, Mus musculus
  misc_feature (1)...(273): n = A,T,C or G
caaagaagcttgtgctcgncagangaaagagaccatcacanatgagcacaactggtccacatgcagggaatatctaggttgngggctgnccagccaccatggttgtagatgcaaatcatctcctgcagccagggctcaagaaacgctatgaaagaaagggngnaaagatcttaagagtcatgagaaataancagtctgttgtgaangcataccatgancagagatcagnggcggagntccccanngcttgcttngagccagccaatcagatgg

SEQ ID NO: 574 - DNA, 143 bp, Mus musculus
  misc_feature (1)...(143): n = A,T,C or G
caatcacactgtcctgagccctttgntaagctgnctgctttntccacccaacagccctaagaggctgagactcaaccacatggcagncacatgagtncgnagaatganntnacnttagaatctatagtataaattaccgcaga

SEQ ID NO: 575 - DNA, 284 bp, Mus musculus
  misc_feature (1)...(284): n = A,T,C or G
actgaggttgccgtatcctgagctgcaatgttctctgangcttctcactctggtttgccatgtggnggtgtcgtatacctgcccttagctcaactctagcatcaataaacagctaccacatgtcaatcactcatgccagacacattctgcattagctcatgtaaaccccacaagtctctgaagttggaatgacnggtcctgctcaagagaaagaatagatgctacttggagaaaggagatcattagatggaggtcagcaacaagctgatgggaaaaacaaaaaa

SEQ ID NO: 576 - DNA, 122 bp, Mus musculus
  misc_feature (1)...(122): n = A,T,C or G
actactagtaaccagcagcagcagcnccagtgatggntaaagagntgnctnaacgaataaaantncttngngtgtttcttccagaggttncgnggncatcctagttgggggataacaaccat

SEQ ID NO: 577 - DNA, 200 bp, Mus musculus
  misc_feature (1)...(200): n = A,T,C or G
ctcaacaagctgggattccgtgntgntggtgacttgnacagcattgngntctgtagacanctgtgacagagaccacggatgagtgnantnacncctgcngaggctgggnnactgattcagtgnnctgccttnctgncgccaggaccctttaccacagttcctcgggttgcggngtcctacaaccataagataatctttgc

SEQ ID NO: 578 - DNA, 352 bp, Mus musculus
  misc_feature (1)...(352): n = A,T,C or G
attatagtgttcccantaganggnatccacggtttcaactttacaagaacatccatttacccgnncttggattttatgccgnctcccaagctggncaggtggaacccgtgtctggagccctttcggttcaatgacacggaggtaggtgaggagnccagcagactgagccaaaagccacagtgtgctgcctgaggtttgaaggaggctctgggatccnaaccaccgagcctaaactccccaagccccgtgctgatacgggacattacgcanatacggatcttttcattggngaatttcacaagacccacactaatcgaaacatattaaacaagtcaagttgtaaaaaaaaaaa

SEQ ID NO: 579 - DNA, 120 bp, Mus musculus
  misc_feature (1)...(120): n = A,T,C or G
catgcacgttatcctgcctcgtttggnatgaagcgcncatnacacgtaccangcgagcactctgcacaacctagccccttgtcagaacctatccaagaaagttgtcttctgaagcgctga

SEQ ID NO: 580 - DNA, 467 bp, Mus musculus
  misc_feature (1)...(467): n = A,T,C or G
gactgagatctgtcgaagcagntgcaggaaaaaatagtcctgcaatctgttccagtgttngcccttctctgaacagtttgcctcgtgagaatgtccacagctgactcattctattctacaaataccaaacggcacccagggctgtgattnnanccacacctaccctgcccagntcagaaacagncactctaggcctcagaatcatctattttcaggtgctggacggccttattaaacggnntgtattccntgnaggggaatggccccaggggccgggaatgancacagtnccgaggctttgaacggttctaatcgtgagtgcntttaaaccagaggaaggaaaagcgaanctgaagggaacacagaacggcaggtctttacagtnnaacccttgangctcggaaatanatngcatggaaccaaaaacatttggaagactgctcattgaagcaacagcagcaagatgt

SEQ ID NO: 581 - DNA, 116 bp, Mus musculus
  misc_feature (1)...(116): n = A,T,C or G
tgactagaagccttcatttggtaacccactgaggnntnaacagnccctgattctctgcctgtctgccancccagggcagccaagcctntttggggaaaagaatatcatttgttttt

SEQ ID NO: 582 - DNA, 142 bp, Mus musculus
  misc_feature (1)...(142): n = A,T,C or G
acctggacacagaaatanggnttgtngtancctcctctcagnnctagatgaaaaagnctgnggnaaatgggtaacctgcacaacactggcaatacttaaataatagaatcaactgggagataaaaaccatccaaccaccatg

SEQ ID NO: 583 - DNA, 146 bp, Mus musculus
  misc_feature (1)...(146): n = A,T,C or G
accaggctccagcgtcagcagaaatacganttgnaaagacccaggctggtggaagggaaggcaccctccaatccccanngcangcccntnttggcaaggncgancngngnctgtgcaggtctaatcntnactggctgagctgcctc

SEQ ID NO: 584 - DNA, 272 bp, Mus musculus
  misc_feature (1)...(272): n = A,T,C or G
ttaccaaggccacgtagaagagcagaaggntgcctccagtctctgaaatgagagacggagtatggcagagttctggaaaatgtccactagaaggtaacatcagctaactgtccacgcagggttatttttatttgaatgcataaccaggactcggggttttctcccaaaagattccagtngggggcagcaaacattagcatggatctcaagcttacaattcttttactgtgtgagaatactttaaaaccgtttattaaaaagacttatctatg

SEQ ID NO: 585 - DNA, 115 bp, Mus musculus
  misc_feature (1)...(115): n = A,T,C or G
gactgagtatgccttggnagtcctctgcttcngcctatcagagagganaatcatgacangagggntttccnagccntccagccagagatgttacngngatgaacccttccataaa

SEQ ID NO: 586 - DNA, 406 bp, Mus musculus
  misc_feature (1)...(406): n = A,T,C or G
gactgaggactggggacctnccgcctcacgctggtgagagctggagntcgcaggggtgcaccatcatgcccagcnccactgtttaatttgtctgcagaananaaaacgccctcttnctggatccctgaagatgactggcatnaagngagggatatcactttgtcttctggatcaccntttgtcatctctgcctacctccatggctaangaaggaaggagcngggccttatgtgacctgagcttcattgccacgtcttagngncagaggatcctgaaccatcctccaagagaagagtggatctgatgccctcttcagaccccagagaggaccaggcactcatgtggnatacatatatatacatacatacttacgtgtaaaacattcacacacataaaacagaaataa

SEQ ID NO: 587 - DNA, 142 bp, Mus musculus
  misc_feature (1)...(142): n = A,T,C or G
gactgagggtatataaacagtatganctgccgaaacaactctgagaacagctgagctgcctggaggaggngctccaacctctgaagctgtctgcaaaattgtgcacggagcgctgggttcccagattctgagcctgtcatcc

SEQ ID NO: 588 - DNA, 234 bp, Mus musculus
gactgaggagaatatgaaccagaagctactgaagttggaaaacttgctacgatttcatactatttgtaggcaggtgcacagcccaagtcaaagaagactcttagcatggtgtagacatgggtttgcaccggcttcctcagtgtggagagatctgctgggtgcccggtcctggcagacagacatgctcattggttcagctttgcatcagcacagacttcttgtaacaaaaaaaaa

SEQ ID NO: 589 - DNA, 207 bp, Mus musculus
  misc_feature (1)...(207): n = A,T,C or G
gactgaggtgaggactgacattagnaagccgtggngaagacattagaaacgtgagctttaactataaaggactcaatntttgcttcaagtgaacttccatggctctattntngcctntcatntagaaaggttttcttccctcccttgctaaaatgaacccttttgaagagcctggnggagaacctggnctgaaaacatgcacccctg

SEQ ID NO: 590 - DNA, 360 bp, Mus musculus
  misc_feature (1)...(360): n = A,T,C or G
ctggggcctccaaaaaaancatncatgtgcctgtctgnagcctaggtggaggacagattctgacagcngaggcatgangaccactatnaanatcggtctntaaggtccngaggcaatccatgttggttaccagggnggtgnccnatgccancacncatnggcttgctatttcttggttgantnccttttgagacangntctattntttatatgggtntatgactgncccncttgtgggcctatncntanggaggccagaagagcctgtgcttgcatcatgngggttccagggattgaatttaanttactaggnttggtggcaggggccttgattngctgagctatcttgccaacccagtt

SEQ ID NO: 591 - DNA, 180 bp, Mus musculus
  misc_feature (1)...(180): n = A,T,C or G
agctacctctccatcaccacgnctacctgcgngccaccttgtttcctgccatgataacaanggactaaaaacctntgaactgncaatncnagttaaangctttcttttataaaantggctggngacatgggggtctctncacagaaataaaactntaactaacacacccaaaaaaaaaaa

SEQ ID NO: 592 - DNA, 223 bp, Mus musculus
  misc_feature (1)...(223): n = A,T,C or G
aagctcctattctctagaacagcnnacgaacttctcagacctgcagncatgcnanctgggggggacgacntcaaaaangagtgaggtctggatannggantncngccttactacaaactgaangananactaantatgngttcntgaccnccttccctcatttcacattatgaatctgatttctccatttgtcaatgaatccctcanttctagattgccatta

SEQ ID NO: 593 - DNA, 180 bp, Mus musculus
  misc_feature (1)...(180): n = A,T,C or G
catctagcatagtgcttgacctacagcagaagttcaataantatctactgaatgaatgctatatactgnnatggttnacatacgtttacaatgctatggttaaaaatataagcattctccaaaggtctactacctagcgtgtaccacaataaaaactgttcaaaagctcaaaaaaaaaaa

SEQ ID NO: 594 - DNA, 124 bp, Mus musculus
  misc_feature (1)...(124): n = A,T,C or G
tatcccatgaccgctagagggtnactgngaaangcttgntcttcnttncttatgtacaagagttgnggatgaataccnggtacttgagtgctctaggcttgcatctgtgcacacggaccctcct

SEQ ID NO: 595 - DNA, 254 bp, Mus musculus
  misc_feature (1)...(254): n = A,T,C or G
ccccttcacatttgaacagaacattctgactgcggccacatcgtggttcctcgggcccatctagtttcagacggaagacttcatttctccactacttccctgaagccacaaagacctgccttgttagcaccaggaagggcctggtgtgtgcggnctgctgctgctgctgtcctccaagctcaagtcatgagagaagggaccacacacagggctgnactgngcctgcagaggcattgncctgattggaacctggg

SEQ ID NO: 596 - DNA, 166 bp, Mus musculus
tgagactgagcagtccttgctggcagtatctatcctgcaaagttgcagcaaagaccggattggtaaatacctggcctcttcgagagaaaaacagcaccttccccaatcacggtctgtcgcttgtatttgctcctgtttaaatacatctgtcttcctagtttatttg

SEQ ID NO: 597 - DNA, 106 bp, Mus musculus
  misc_feature (1)...(106): n = A,T,C or G
taggaaacggaccccaatatngtgatagttnccaaggactggtacaggatgggccancaagnaggaccagcaagacccatagagttccagctgtgaaaaaaaaatg

SEQ ID NO: 598 - DNA, 172 bp, Mus musculus
  misc_feature (1)...(172): n = A,T,C or G
ctgcctggcctgggcantgatgatgccccccntatncagnctgattgangaggaggtacaggtggacaccggccttggnnacattacacactgncagaaagtncaccccangtnnttantngatgacagtgaccattgtgactcanntcnaggacatttataggtgacttgt

SEQ ID NO: 599 - DNA, 120 bp, Mus musculus
  misc_feature (1)...(120): n = A,T,C or G
agaggggcaaaaccagctaattctttcccttgcttttcctcctctaacctcaagggggaagaaagctggatccggagcccgctataataaatgaatnggtttttctccacaaaaaaaaaa

SEQ ID NO: 600 - DNA, 442 bp, Mus musculus
  misc_feature (1)...(442): n = A,T,C or G
gactgaggctttttatctctccggcaaacaatttcaaatcatattgaaagcaataacttgaccggctgcaaactgctgctcatgaaatcttcaacaataagagcagacacttgaatggtttcatatcctctgtccaagattaagtagataagtcttgcatcagattccattactgtcttaaaacatccacaacacgcaactgatagaagctagataaactacaaagtccctagcttctgtgacatgtaagaagcagtgacaagcaagcaaaatacagagtcaaaagacaaatcaaagaaaaggggcggggggtcgatggtctgaacccacagaagagacactgtctcttaggagatcttagacaagccacaaagcgccggagatgtggctgcttanaggacactcgcctgcacactgnaaagnanctaatgccaccaagctg

SEQ ID NO: 601 - DNA, 303 bp, Mus musculus
  misc_feature (1)...(303): n = A,T,C or G
ctctgctttctaagtgctaatgtgctgggattgaaggaccagtgctggtgaattgggacagaagcaattcctcattacccagagagtgagctgcttgggagcttcagcagcangatttcccttcagtccttagctcagagccagctgggggancggaagtgctggcctggcactgagcgtgcctttgccagcgataagctggatccttacttaaggttgagtnnccacngatngagccctatcttanntcnncttctcatcgctggtcttgaancctgctttgtttaacttcctgctgtttgg

SEQ ID NO: 602 - DNA, 109 bp, Mus musculus
gactgagggatgaacccagtatcttcactcaagcaaggcaaactgtctagctcaccgccacactcccacgcctaaccagcttgaacttgatgaacacaggagaaaacag

SEQ ID NO: 603 - DNA, 350 bp, Mus musculus
  misc_feature (1)...(350): n = A,T,C or G
gcaggacatgttgganngacccagggactatgggctactntgcctgccaggntgccaggntgtacccntgangngttagctgangccccancagcactcnngcncggngatccnggacattgccttctggctcacacagacaaanaccagnnccaggaaaagaaanctggnaaanagattataaancagggccgggctgcagannaggggtagaatgctngcttgtgtagcactgcttgaggccctgagattncatcccagcactacaaatncncanaaccatggnnaaataggaaggcctngactatctggaatcattttagcaggngggggnggctcacacctgcaaa

SEQ ID NO: 604 - DNA, 144 bp, Mus musculus
  misc_feature (1)...(144): n = A,T,C or G
ctgatgaggtcacactatgcccaggcttggcctcaaactcattacatagtaangggagtgacctgggagttttcnnggagtcccctttcttggcaccntcttctttatggctggtgtggggaatggggaaccacccacccatta

SEQ ID NO: 605 - DNA, 219 bp, Mus musculus
  misc_feature (1)...(219): n = A,T,C or G
gacttcactgaatgactgaaaccccganagggcatactatggnccccacacttgggttcccagaccaggntcanggccagctggctgctggaattncacaccangggagtcctggtgtctccatgctaatcangaactccaggatttgggnctttgtattccgaatcaagtcaccacaaacacagcagctagccatcacaaagaaaagaaattgacgag

SEQ ID NO: 606 - DNA, 103 bp, Mus musculus
  misc_feature (1)...(103): n = A,T,C or G
cgttcactgccagctnctgggnaancagcactgttcnntgcngncggtcctcactcccatgcacacacacacgtatanttaaagatgacgcattaggagccaa

SEQ ID NO: 607 - DNA, 121 bp, Mus musculus
  misc_feature (1)...(121): n = A,T,C or G
ttatggagaccaaaggctgaagcccagacgcacgaagctctttgtgttcctggacggnggccatntgcctgcttgatnntctccctnaccatcttttngctgnatccccggcccattgctg

SEQ ID NO: 608 - DNA, 352 bp, Mus musculus
  misc_feature (1)...(352): n = A,T,C or G
gaactgagagctatgaagaggaagcacggntgttttcagntaccnagggaatgggactgagttctggaggcttnagagaaacaggacnntgagccaagcntccacccacagaccccaganggaccagactaccacaacacagtttaaagagcnggntntccatgggcctatgatgaggtggncctgtaacccattcacagagacatnctgcctccaatgaccagangaggagaaacagnacaagnaaccaanagccccttgagcaaagtgaatcattaaacaaaaacggcancagaaatttttatggggactaaatgacagncatgtgattatctaaaaaaaaaatttgtga

SEQ ID NO: 609 - DNA, 260 bp, Mus musculus
  misc_feature (1)...(260): n = A,T,C or G
gcaactgttgccgtttcagagcangaanctgtatntcgngttctctttatgngttgttacccaaggagnagcccagaaaccaangcnnggagtaacttttacaacgcgcatttgnactaaaggacaggttaaaaanttcacagcagaatactactgtnttttctaagggggacgggatctcctagatccgtcacnaaagacgctttgcanactctnaaaagangccttttactaagnaatctaaccacctcaatgttttc

SEQ ID NO: 610 - DNA, 552 bp, Mus musculus
  misc_feature (1)...(552): n = A,T,C or G
gactgaggctcctgcatctctcagtcatcctgtttaagtgctacgcggagtgaaggacaaaaagtagaagccaatgatcctgctagaggaggaggcggctgtgatgtggaacatccgaaagtgggagcacctcaaacagatacaccttcgggtatcaggtcacctggccccgcctctggaacctgccggccatcccggcagcacagctcctgcactgacacagaccagggaactggggctaaggcaaaacctgacgttccaaagtagaggcgacgacttgcatttgtgagtctgaagacccagttnggctctaggtgtgagcacacagtggcctgcctccctttctcacacagccacactgctgtactggaacaagcggcaggcagcacctttaaggggtgcttcctgggagtctggtgacagcttaaggaatgcagctccaccatgtgcaaatgaagactgtgccttnaagctcacaagctaccccactgncccaggaaccactctgtggccagggacaatgctncccaaggcctgcaaagagatgaccta

SEQ ID NO: 611 - DNA, 169 bp, Mus musculus
  misc_feature (1)...(169): n = A,T,C or G
catcagacaggaggagcnttggagcttgctcccagnctgcctagcctgtgtctagtgccnantcaacatatttttngagggctcacaacgaanagagaantggtgtttncccacctccccgaaaaacaatttttttgnggggggggccctactgaggaggataaaaaga

SEQ ID NO: 612 - DNA, 183 bp, Mus musculus
actcaaagcagtacacaggacaacgatgcagtggtttgctctgtcactacctatcctggaagacaggggtccacacctgccctctcagaatacagtctcagaataggtcttgtgtggaccgccatcctcggaggcttgtagttgtcactgtagcccagatctccctgtcttttttttttttaa

SEQ ID NO: 613 - DNA, 265 bp, Mus musculus
  misc_feature (1)...(265): n = A,T,C or G
cttacatcagatggatagccntaaccacatactgccataggcactgancactgcttctgctttgcctggccatctcatacctgtgagctctatgctcacttcacaaccattggcctcttgccccattacagtcaaaagctgaggaactgccatgaatcttgcccatgatcaagccaacactggacagtcccgagtccattccacatgaacagaagtcaagctattgttgttgtttttttaaataaggagataaccagaatattca

SEQ ID NO: 614 - DNA, 231 bp, Mus musculus
  misc_feature (1)...(231): n = A,T,C or G
agactgacaggacctttctgtgnccatggagcacgtgcaccttagggtttcttccagcatcagtgttctcgagatggttttaagatgaggtttgatgtcaacttctccagtgacttctgccctttcccctgtccccagccgcaggtatcagttcctcttttggtgtcatcatttaagaagccttagaacccctttttttggatattcagtaaattccaacaaagagcccca

SEQ ID NO: 615 - DNA, 326 bp, Mus musculus
  misc_feature (1)...(326): n = A,T,C or G
gactgaggtggatcggcagcctggttaaccatcgtgtccttgatgtgagtcacacctaanatanactctgagttggacggagtctgatcatctcgccagttgacacagncagcgtgagcaggtggaatttggctcttcctgaaagagctgctgaagaaggananctgantctnnnggtagcagcagctgccnttgggttccccacaganctanggngcagcatgtacctaanactgaggnaagctncttcccaggataccaggatgatgaattatgttgtcacaggttcccttgcaagaccctatnccccccccctttccaaaatt

SEQ ID NO: 616 - DNA, 110 bp, Mus musculus
  misc_feature (1)...(110): n = A,T,C or G
ttcctctatgccgggacggagttgtagatgntaagatgaccaaagtanaggacgctcncgaanagnccnagncgcangnaggagggcctgcatntgaggagcatcacgta

SEQ ID NO: 617 - DNA, 315 bp, Mus musculus
  misc_feature (1)...(315): n = A,T,C or G
gactgagactcacttctaaaggtcagtatgaaacactggcagacctctgcccaacagcctactgaccaccagacgaaggacagaacgtcactcttccaaccagacatccgagaggatgaggaccaggctcaaacctaagcccagcaaagtgatnaagatgagagctgtggccgtaggtcctgcttgtgacatggacatgaggcatcttggtttncagatggggaaactgangntggagagaagaggtaacttgtccaagctcacacaggtggngcctaangatcatagactgcttgggatgttgctggccctctg

SEQ ID NO: 618 - DNA, 363 bp, Mus musculus
  misc_feature (1)...(363): n = A,T,C or G
gagcccagcccacagatcgtggacttcccatgcacgtcagtggcagcacagaagtgagacttccacatgttctccagtggcagaatggaccacagacctccacatgacctccagcaccagtgtgggaaaaggcatcactgcggtctcctgctgcagccctgattatgaacatcaacatggtctctggtggcagcatggaccacaaacatcagtatggcccctaacatttgtgtgtctatgcatgtgcatattatttatattatatataatataaatatttatacagagtatatatgtactctgtataaataaaagtcatgtgtattatatacatnnaatgtcnatatactctataaaatatag

SEQ ID NO: 619 - DNA, 125 bp, Mus musculus
gactgaggcagaaaaggatccagtaacagggtgagctgtgagatgcagggaccaaagccatctagagggaaggaccacctgtggcctccggaggagaggggggcggggcgagaaaagaaaaacaa

SEQ ID NO: 620 - DNA, 342 bp, Mus musculus
  misc_feature (1)...(342): n = A,T,C or G
ggaaaactttcagcctcgtanctgagggaggaccctgaggaacatctacaacagtgaaagcgnnacttcttggncttggncataaaggctgaatatagagcagttncnttntgacgancaagcngaggctgcttaagttctctcagcgctgcttgcagtaagtgatccatccacgcacacctgaagacaaaggnaccgagagcatgncactgatttnttgctgtgntntngnaaagagggngtntgtngatctatctttccaaatgtgaatnttgngaagattcnagaagaccttaaaancntagattatagacatcttatanatttcaagagctttataag

SEQ ID NO: 621 - DNA, 428 bp, Mus musculus
  misc_feature (1)...(428): n = A,T,C or G
gactgaggtttaagtatgactcggntgcgattcccacactcctgantcttctgctggaaggatggcctcatgaccaggttgacagacagcactctgtgtcggtgacacagaactctggccgaccacactgaagcacgatgctccagcaggtgaatggccacagtttaggctctgatgccgaaggtagggcctccctcaagggagacctaagggagttcctgggtggggagatcccactgcaccagctggatgacctcaccaaggtgaatcccgtgacactggaaacagtcctgaggtgcctgcaggcccgatacacagaagacatattctataccaangctggctgtaccttggtagctntgaacccctttaagcacgtncctcaactctatgcaccanaactgatgcangagtaccatgctgcacct

SEQ ID NO: 622 - DNA, 378 bp, Mus musculus
  misc_feature (1)...(378): n = A,T,C or G
actaaaggtggctatantagcggncaactttgaacttgcggagtacntgaagaaccacnaggagacagacattgtaccacttgcaccaaccaggaggcccatctcggnggctcctncctgctncnacngtcctaccatgggctgggcccagncttgcacagtgnatgagctagccggcctgcgccctccagngctgggcttccacaggacctgcagctggggaacancctcactgnaccggcagtggtgagcccttgatggtngagntgncccatgnaggngctctgggatggagcttnttgggnccttgtgangnagcanatggnanntgcctctcagtgnctatgccntcaccntgtttttgggttgtaaaaagga

SEQ ID NO: 623 - DNA, 244 bp, Mus musculus
  misc_feature (1)...(244): n = A,T,C or G
ttaacaagcctccagaaactgggagccaggagtctggccttgctacatnttctgccagagaactgagaaccacttgcctgtncgccagctgagctgntgaagagcctactttgcaactnaatccagctgaaacaagcaacagaactcagccaaacaaagggattgggtccttgggttctcccccccaccccccttatgttcagngtcgtacattaaaatttgaaccttgatcagaaaaaaaaaa

SEQ ID NO: 624 - DNA, 114 bp, Mus musculus
  misc_feature (1)...(114): n = A,T,C or G
catagctagaattctncttgagattacacatcaaggncncanttttnacttaanaggaagggtgctaagaatttgcttttttaatttgcctgagttctggactttaatggcagg

SEQ ID NO: 625 - DNA, 387 bp, Mus musculus
  misc_feature (1)...(387): n = A,T,C or G
ctatgagctgttccttggaggcttccntaatgngaccagngtggattactntncagtagnggnggcagncatgcaagntcgntatgcccatgtacccagtctacgctggnagaccatggatgntcgagcactggacttccctagtgggtnttttgatgttgccctcganaagggtactctggatgccatgctggctggnnagccagatccctggaatgtatcttntgaaggtgtccacactgagnaccaggagctgagtgaggtaagccggntgctagttcctggaggccgattcatctcaatgacttctgcaggtccccactttaggatcagacactatgctcaatcccgttatgactggncactgaggcatacaacctatagcag

SEQ ID NO: 626 - DNA, 127 bp, Mus musculus
  misc_feature (1)...(127): n = A,T,C or G
tcacccactacaactttcagangaangccatgactgtgangganttcaggcanctgtntaacagcttnaacnactggactccaagatacttggattatgaatatttgggnacgcaaatagtgggaat

SEQ ID NO: 627 - DNA, 385 bp, Mus musculus
gggctgcggtgaggaggccgttacaagaaggatgctcaagcaatgtttgcatctctgcctactgtcctgtgtacagagcttctcagacaccatcctttccaaccagggatggcgtgtaaaaagaacaactatgaaaatacccaccgtaggttgaaggataattgggagactcagtgactaaatataacagagagcctggatcagaactggggtcctgggaaaagcagcagagatcacattctgtgacaggatctgtttacagtactgaatcaacaatcttttgtttggttaattatgatttggcaatcaatgcaagatgtggacattaggggaagctggggaaggacagaagagaactacaaaataaacataactaatttcaaaa

SEQ ID NO: 628 - DNA, 173 bp, Mus musculus
  misc_feature (1)...(173): n = A,T,C or G
tccgtactcacagttcanccaccacaaatcctanngtgnattgctttanaaaatcccccaatctgctgtggccccactgctttcatccaaggtcaagccctgagtctgnttcctgggacacagcttttgttgtaaaaccatttntaattcacccttcactttaaaagtattga

SEQ ID NO: 629 - DNA, 115 bp, Mus musculus
  misc_feature (1)...(115): n = A,T,C or G
atgaaatctagatgccctgttctgnagtgnntgaagacaggtacagaagnacttacattaattaantaantaagataaanagatnanctttaaatacaatgattgaataggtaaa

SEQ ID NO: 630 - DNA, 300 bp, Mus musculus
  misc_feature (1)...(300): n = A,T,C or G
gactgagactgcctgatgatactttcccagcacaggaaaagccatcaagaaggaccctgtgatgctatctttgtcancctagaatcattatcaagaaagtctctataaggaatagtctactttggnttaatctatgggggattgccttantctangttaatatgatgtggtattgaccctgcccactgtgggcactnccnttccctagccagtggnttctcaactacataananttggagnaatcatgatagaacacnanngaangaactgaaagtgtgaggactcttctctgaccacag

SEQ ID NO: 631 - DNA, 272 bp, Mus musculus
  misc_feature (1)...(272): n = A,T,C or G
taggaactgagctatcaggagtctgccacctctctgccttgctgatgcacccaggcagggcgtcacttggtttgcaggagtacatgaccacagatcanagccattggctgcacagatacctgactctgggctctcaggaagactcaggcagagatggggagtcggcctgcaagctgggacgctagagctcacgtgcagttctccatttagctaggaggtttccagggcaaccaccgaagcagtaattaaagatgaagagctaaaaaaaaaaa

SEQ ID NO: 632 - DNA, 150 bp, Mus musculus
  misc_feature (1)...(150): n = A,T,C or G
agactgaggctttttttaaatgaagattataanaacttggggctagaaagatggctctgntggtcaagaacactcactgaacacctggaaccctggcttcacctcagcatacccccacaaaaaanttactgaagagaatagaatgaaaat

SEQ ID NO: 633 - DNA, 163 bp, Mus musculus
  misc_feature (1)...(163): n = A,T,C or G
gactgaggtgggttcgggctgaggtagcagcctgggcgnaggccanngttccntcttgtgganncnncaaaggctnngacaggaagcaggnctggatncatatatactactgcntngaancagatgaatacggagctcggtacccggtgatcgaaggtcctat

SEQ ID NO: 634 - DNA, 137 bp, Mus musculus
  misc_feature (1)...(137): n = A,T,C or G
tactagccatctaagcncttnagcaaagnatactatgaatgcnanntgnnaccatggagganacaatacggctnagtcttannccaccagcccctctggaaaccaggcctgagnggaatggagtgtattgagaatgg

SEQ ID NO: 635 - DNA, 284 bp, Mus musculus
  misc_feature (1)...(284): n = A,T,C or G
tcagagcgtcgcagggtanttgactagccaagnagaaatcccangnggtcactgggagnctgnncggacacactgagtngtntntgcntcngggaantggaggnaggcctctttctgctanaatgaagtntgacattcactgggctacctganatcncccctnncaacaaacanncaactgcctgncncactgncttccacnaggaggcctctgacttccacatgtgcccccacccaccctataaataagtaaataaataaatgtagtgagaaaaaaattaaaa

SEQ ID NO: 636 - DNA, 422 bp, Mus musculus
  misc_feature (1)...(422): n = A,T,C or G
acacttattgaacattttcttccgggnatgggggccttggacccctggaaacccgaaaccccaggatggcacaaatggcttgggctttttggggcccccctttacaggaaccctncgttctttttgcccttttggcccggggccagcntggcttggccccccttgggaagaaaggggaatggaaccaccccggaanaaaacttggggggccctttaaccntttaaggnggggccttaanttttttnggccctttnaanttttngggggnnaaancnaaaggggaccttgggaaaaaccccccnaaaaagggggggaaaaacntncnngggaancccctttgttgaaanaccccttgnggggttttttttccccggggggagggggnaacccccccccccccctttttttttttccccagggg

SEQ ID NO: 637 - DNA, 122 bp, Mus musculus
  misc_feature (1)...(122): n = A,T,C or G
gcctccccaaaatgaatgcgcntaatttggatgacagctgaccctcctacatacantctgcagatagagccacaaganggatgtcatccggcggacagcntggaaaggagagtgacacagct

SEQ ID NO: 638 - DNA, 235 bp, Mus musculus
  misc_feature (1)...(235): n = A,T,C or G
ggtgatacatatttcaacagnagcggtcctttctctgtacaactaaagcagagactacataacccaccaggtaccgcctccgaggggcaagcgactaggttgccatctctgtagtagtcctctcctacacatccgccgagaatagtattagcggntggactacaaatcccatagcatcatgngctccttcacccttcatttttgngggagnccccgccccggtcactttcattgg

SEQ ID NO: 639 - DNA, 129 bp, Mus musculus
  misc_feature (1)...(129): n = A,T,C or G
tgagactgagaaagagcctcntctgggacagtggaaatggctgtgaaacagtgaagcttcaatccacggtttcctccagcaggaccaactgaatgatctcaaaggaacaataaagacttgaatcttgta

SEQ ID NO: 640 - DNA, 304 bp, Mus musculus
  misc_feature (1)...(304): n = A,T,C or G
tcccgactcacacagcanaggcctctggaangagcatgcgctgaaccttccaggctggaagctgtgggtcccagttncaggccgccccagcctactaggccccagcctgtnattgnnccaggactctgcggatgcagaggatgcanatacaagcctgtggcatccgnacacccaggccgccatctacagcaggntttatcatttnccacccgacccacaagccatctgataaacaagtgattacttcagatttgcatataataaatatcacccccaggaagggtggtagcgtagaaaaaaaaaa

SEQ ID NO: 641 - DNA, 303 bp, Mus musculus
  misc_feature (1)...(303): n = A,T,C or G
tgagattttagatgatcacctncnntcctgcttgagcttaanaacttgaagcnngatgagcttgctgntgncagcatggaaggagggttcacacatgcncagttagttacctnatgtcagagctccgaagacaagtgtgccatctatgtcntaatggactttagtggcgttggtttcttccttgcttanaatgaggcactttttgtcatttgtggaaacttgcctgtaattcattttcctcactgcagtattgagagttataccaaattgaaaagatatgaatgaatatcctaaaaaaaaaaa

SEQ ID NO: 642 - DNA, 521 bp, Mus musculus
  misc_feature (1)...(521): n = A,T,C or G
gactgagggtggaagctntgagagacgcagcctnntgctgntgngcaggagaaagatttcttctggagangatccacagtatccanaacagccgggacatgaggcgnattactctgatggagaangagagganctaancctnnctgccnaccgtntgatgggccgnacnctcacnnnngnggtctctggttggaancngatcctgaaacccccagctngaggaatncttgaagcatgccactgaggattatagacnaggtggncagcaagttcctagatnanctggggaatgccaagagccacttantgncantttacngtgcctgctcatnggaggtgccgcctgggccggtggaccanaagtttnnatcgatagtgatcggttgcgctcttgaggatcanaaganaatcaagaggcgattggagactctgntgaggaacnttgacaactccgacaaggccattaaactcctagagcatgctaaaggagctgnntncaaaagcctacagaacactgacgg

SEQ ID NO: 643 - DNA, 175 bp, Mus musculus
gactgaggaactgtcagaatccctgctgatggaagtgcccaggtgggcctggcggcagacatcttggaatcccaccaatgtgaagacttgagtatcacaatggctgcaagttcgagaccagcccaagctaaatagatcctgtcaaagtaataacagtaatgttgtaaatgaaaaa

SEQ ID NO: 644 - DNA, 533 bp, Mus musculus
  misc_feature (1)...(533): n = A,T,C or G
gaactgaggtttctactgcctagaatccggccttgcagatcacgtgctggggaggccgttgccatggtaacggagcaagagatagaggccatagggaagaccttggtggaccccaagcagcccctgcaggcccgcttccgggccctgtttacacttcgggggcttggtggccctgatgctatctcgtggatcagccggggctttgaggacagctctgctcttctgaagcacgagctggcctactgcctgggccagatgagggacgcacgggccatccctgtgctggcggatgtgctgcaggacacgagccaggagcccatggtgcgtcatgaggcaggggaagccctgggggcgattggtaacccggaagttctaggcctcctgaagcagtattctacggacccagtggttgaggtggctgaaacgtgccagcttcgccgttggtcgnctagagtggctacagcagcacccgggggaggccacatgtgcaggaccctaccttttagtggacccagnaccccctgcagaaaaca

SEQ ID NO: 645 - DNA, 182 bp, Mus musculus
  misc_feature (1)...(182): n = A,T,C or G
agactgaggcttgagagngactctatggcttgcttccacacacttaaggacccgaggtcnaatcaantctcaagtaanacgctgggtgcatgagaaccaaccttacaaatttatcctctgtcttcantggngtgacaggcgccaccctgaaataataatgaatccgttaaaaaaaaaagttt

SEQ ID NO: 646 - DNA, 148 bp, Mus musculus
gactgaggtcgaatcttcctcatgtctacgagtggactaaatctggacattccccaggctataggcactcaacaaacagcagttaccctcagactatggcattattgaatgaatagaagagaaaaggccttccaggcaaaaaaaaaaa

SEQ ID NO: 647 - DNA, 263 bp, Mus musculus
  misc_feature (1)...(263): n = A,T,C or G
ttgctaatcagagaanaattgatttttgaagacagcatttgaagacagtaaaactgtgtttgaagaatattaaaactggatcgncaagatgactcantgggtgaaagacatttgcnaccacagttcaacccctgagatctgcaggttggaaggacagaatggagcctggcaggtgatcttctgacttccacgtgcacactgtggcatgtgtgtgctctgcccccaacaataaataaatgtaaaaactgtgcgttaaaaagata

SEQ ID NO: 648 - DNA, 386 bp, Mus musculus
  misc_feature (1)...(386): n = A,T,C or G
ctggacctgcctagangctggngtggngcggctgcagatgctgcttctccagcnggatcagaggcnnaggcagtctattcccctcaagggccagctagactgnngaatgnctcagacancanngagangctgtctccnncancatgatggctantnctgttctctncngacatgtccttganactngntctgtacancattgctggncngcnaactaacaantacgnctgcctntgcctcccaagtgccnggcntttttngattttagagatgacctatccntgtatccctgcatgtcntggaactccccangnttggctcttgaactcagcagagatcttgcctgcctctgccctcgagngctgggattaaaagcttaccccact

SEQ ID NO: 649 - DNA, 121 bp, Mus musculus
  misc_feature (1)...(121): n = A,T,C or G
gttcatttcccagcacagacatggaagctgacaagcggnctgcaactccagctccagggaatctgacaccctnacacagacntacattgcaggcanagncacgtaatatacataaataaaa

SEQ ID NO: 650 - DNA, 180 bp, Mus musculus
  misc_feature (1)...(180): n = A,T,C or G
tgccccctacaagacctgcgtctagcaccagtttccaggncattcctnnacaantntgcacccccaggttacaagcctgcccctgacacttcatttcctaacaaccaccaatcaggaggaaagcagaagcccatggtttggctcccagcaccagccanttatggttaaaggctataattg

SEQ ID NO: 651 - DNA, 330 bp, Mus musculus
gactgaggaccccagtggattccctctgtgctgcctcacttttcctatctgcatcagaggagccccaggtccccggggttggccaagagaagagaagactgagagatgagaagagtaaggctcagagagctgaggcagaagctcactttccctaccacttgctgcctgctgcaggctccatgtgccttgggacgtgaacttcacaccagtcccacaggtgaggatggaacagggacgcagccccttggccctgtggctgcaaagcctatgccccagtctcacccagtatctaagtgcggtacttactctaacaagccagtggccacaaca

SEQ ID NO: 652 - DNA, 212 bp, Mus musculus
  misc_feature (1)...(212): n = A,T,C or G
aactactaccgcagactggcaggatcctgggcagcccnnaccttctttctaaaacaccatggctngaatnctcgntgctgctgctgctgctgctgngctgcccactangctgagtntttgcnttcaggtntcacattccctctagaatactgcgttgncctnctggcaaaccacgcaatccactacttgggtatngccggagtttacatgtc

SEQ ID NO: 653 - DNA, 126 bp, Mus musculus
  misc_feature (1)...(126): n = A,T,C or G
tttcagcccagccagggctctgtgcgttanacnctgtcacctctaccgacactaagantagnananacaggangatnncctagagttcgatncctgcctgnctgtatagngagaccctgcttcaaa

SEQ ID NO: 654 - DNA, 155 bp, Mus musculus
  misc_feature (1)...(155): n = A,T,C or G
ataacaacttaaatccagggctntaggactgggatnagcagngatcccatgcagncagaaccatgagtnntgcnccatcgccnnnagcacctncattcgaatagtccatncttngatgngcactagaagagagcacctccattcgaatagtccat

SEQ ID NO: 655 - DNA, 347 bp, Mus musculus
  misc_feature (1)...(347): n = A,T,C or G
cactccccagctagacgttncatcacagcctcnnagataantaaccnttgctncagtnctnactcatgatgganagcttacatttcgccagngaaccntggnncttgtgnnttttagananaaagaggcacctgctgcctnatgacanctcncannaaacactcatttnanagtcccagcccttctaggagctaatggatgaaagccctganaaggaaagaatcacccaaggacacagtttcagatgatctcaaatgaccaagcaaatgacaggcccagnanatgacagctcttttccaatncacaggctggggnggngtttacccataatacagccccttgggggg

SEQ ID NO: 656 - DNA, 114 bp, Mus musculus
  misc_feature (1)...(114): n = A,T,C or G
attgagggaactccaaccaagtgagtggcgnggggccgaggctgccagctctgtccacccgacttctngaganntaatgggncctgngtnaatgcggatgagtgcagccaccgg

SEQ ID NO: 657 - DNA, 333 bp, Mus musculus
  misc_feature (1)...(333): n = A,T,C or G
ccctatcaattctgaactttatgatgactnaagacttnattctacagntntgatnggcctggaactcccttngtanaaaggctagcctgggactgacagacacccacctgcttgngtacagaaggaaaaaaatcccacctattgcagnggnacacctgtaatcaacacttttggaggtagaaacaggaggaaaaggagtgcaggccaacattggctacaggaaacctgtcctcaaacaaacagatgnagctatagtggctngcttctatagngcctaagcacacaccttanagatgcatgctcaccagcttatcccaggaaataaagactctg

SEQ ID NO: 658 - DNA, 218 bp, Mus musculus
  misc_feature (1)...(218): n = A,T,C or G
gactgagggaggaagnctgtctgcccaggacacatggtggtgtncaaaggnncnnctcncctngagtgactgtgtcctncattggatctcancntcgtagntcctgacctcaagcatgcgcatagccgnancnggacnggannatancctgccttgcgangacctgccttcagagntgagtacacccctgcctgaagaaaggacacttcatgccaagg

SEQ ID NO: 659 - DNA, 287 bp, Mus musculus
  misc_feature (1)...(287): n = A,T,C or G
caagcatccttggtggtggcagcgntggcagcacnnncaacagcagcagnangctagtatanagcagccntaanancantagcagcagcagnagnggggggtggcancaatggcagnatgcttanacagaaggctntgagatagcctctgctttcctgaattccatgtcctcagtaccgagattcatctgctgctgggtccaggacttcccatatctcctttatcggatactgcagtaaaacttcgatgctccagntngagactgtaccagcaataaaatgccattt

SEQ ID NO: 660 - DNA, 276 bp, Mus musculus
  misc_feature (1)...(276): n = A,T,C or G
caccataggggatgcaggatnnacntgtgaagatgatgcgagtagccctgncaactgnggatanngactacgaagnctatagagacaactatgaaaatggcattagaagttaaagactatattcacgaggatctcaaagagcatgatcctgggataccacagccacacaggcgactggatcattaacctcaaggacccctagaacccnnncctgaaacnccgtntcgatnaacagtaccatctctgccagtctgtnagcnggatgaaagtcctgat

SEQ ID NO: 661 - DNA, 184 bp, Mus musculus
  misc_feature (1)...(184): n = A,T,C or G
tttagcctgggcagaggncatagtnctntctgtnncatgctccatacgctcccgaggactgcctatngnnnngctatctgaganacggagaagaggacttcttngacagtgctagcacagctaccttncngaacacccgncctctgcaagacctgtctccatncagntctgccccggacctgca

SEQ ID NO: 662 - DNA, 131 bp, Mus musculus
  misc_feature (1)...(131): n = A,T,C or G
aaaccttaaaagttgncctctgaccttcannggagcccacagagtgtgcatacaaccnccagtagaagtgatgaggactcgagctcaagcttttttttttnttttttnctcagcacttaacgccgccaagc

SEQ ID NO: 663 - DNA, 419 bp, Mus musculus
  misc_feature (1)...(419): n = A,T,C or G
actgagaggccagagacgatcaggcaaaggacacaccctgacctgnggtcgccatggagcctgctggtacccacacctgcctagacagccagtgaggaaggcncagcaagcagggcttgccgagatgtggtatagatacctgcactgcagccctcacctcagcgaatcagcgtttgcactnccctgtgtgcgttcctgcatgantgtnancctctgaaccgnagacgctgtcctgtgtcccttgccctgngcccatgcctgncttggttagcagctttaggtgtcctcctctttgtctctccctgtcttcctcctcagtctgcaggaagtgcagtctcgcggtggcattaaacctctgaccacatgtgaactgggaatttacccacacgccacaccaacatcttaagggggagcggggg

SEQ ID NO: 664 - DNA, 169 bp, Mus musculus
  misc_feature (1)...(169): n = A,T,C or G
ctccaagctgccgtctcacangctgcatgnctggatccttgnagactttnnacaaagaagcagancgtgttccatgctgnnttttgagtaacttctccagatttcttcagcacaggatgttggagaatatcatgtgaganaaattaaagngtatttcagctcttgattg

SEQ ID NO: 665 - DNA, 166 bp, Mus musculus
  misc_feature (1)...(166): n = A,T,C or G
ttcagacccatgtatccanttttgctcagccatgaagctcagctcagancctaccacagacnggtnacctaacactancggcgntggtganatntatgggacctcttanctaacacnttgtangctcngatggctccacccccatgngtgaacactggcaagtgga

SEQ ID NO: 666 - DNA, 150 bp, Mus musculus
  misc_feature (1)...(150): n = A,T,C or G
gcctcgaatctgctgnatgcnacgctcggntccctggtgatgcnaagaatnctantcaggangctcctattctctagaaagtataggaacttctcgacctgcgggcatgcangctgggggggtctgacgtgtnncaaggagtgagggctg

SEQ ID NO: 667 - DNA, 218 bp, Mus musculus
  misc_feature (1)...(218): n = A,T,C or G
acgctgggagccgaactcagaaagctctgttgagctgcnancgctnnntaacagangtggcccttanccgccatgnnccagccccatacactaatnttttagattntncctacnactgccttttggacatcctcccaccatgttattatgcgtggattacatgcttatgggccgggannctatcagagcntacntcaatagctccatttggcaaaaaa

SEQ ID NO: 668 - DNA, 238 bp, Mus musculus
  misc_feature (1)...(238): n = A,T,C or G
ccacgatctgtactganaatacagcgcaggcncttaaccttgctgagcgcatgcaggaggccatacaagctgatgngctccctgcagangcttattcaacaagacagaggacttntanttcatgaagaacaccatntctgaccaantnctaatgnacnggacccagacctgcacgggccaggaaactttttacccnttaganngggnacctgagcttnaagctgttacttgaaccaag

SEQ ID NO: 669 - DNA, 119 bp, Mus musculus
  misc_feature (1)...(119): n = A,T,C or G
cgccaatatggagagaccgttcnccttgcttnataantaggggaactnacaanaactgnngagccttgancnggagggggtcaacattttagaaagagngagggctggctctggggctt

SEQ ID NO: 670 - DNA, 135 bp, Mus musculus
  misc_feature (1)...(135): n = A,T,C or G
gtcgtcacttatgcagcacncactctcattcntgatatggaccntctcccanngnccagtgaagaacanagatanannacttcttganattacacatcaaggntctcagctctngacttaatgcaggtagctcca

SEQ ID NO: 671 - DNA, 260 bp, Mus musculus
gactgagatgggacatcaaggctcactggccaagctgatggtgaagccagacgctctcctactggtccctgataactccaaagctgggtcctcttcccactgcccccaactgctactcacaagaactgtccccagatgaaagagaaagtgacgacgctgcttgctccttccataagctcttggggggaaatggtggggtccaatggaggccatggaataccaataactcagagcccagccctccatcagtcacccacctt

SEQ ID NO: 672 - DNA, 290 bp, Mus musculus
  misc_feature (1)...(290): n = A,T,C or G
gactgaggtggggtctttcattatgactgtgaagaagcaccttgtgctggaggaggtcagatccagcctctcagctgcccggtccagcctgaaaggagcttccagcagcccaaggccggatatgtcagtctcacccacaagcccctccccctcccagcggttgaggactcagaggccaaatttgnnatcgccnggnctatgagcagaanntnccnccatggatgggctttttntgangattagcattgngaatgnggtgaacncnanccatnttgagccatctaccatgg

SEQ ID NO: 673 - DNA, 104 bp, Mus musculus
  misc_feature (1)...(104): n = A,T,C or G
ccaccccatgagagacccctgnaggaactcactgaccaagtgtgnggcctacccacagtccttgaaggatggctcatctgagnttacntttacgagtacatgtg

SEQ ID NO: 674 - DNA, 181 bp, Mus musculus
  misc_feature (1)...(181): n = A,T,C or G
agccttcccaagccagaaaacaggctgagccagaccttgactatgctacaccactagggagagaanctangngggagcctgcctccctggatcnttctattgtnaannnactgccactgntgctacctgatgggagacngactagctgatccagagnctacatctcgatcctacacatggg

SEQ ID NO: 675 - DNA, 188 bp, Mus musculus
  misc_feature (1)...(188): n = A,T,C or G
acgggcaatccacagcaaacccttggtgtcacatttctgccagtttttcaggggaaagagcctggtgaagactggctagtcgggctacnaagcctcactccttgacctaagacgggggatttgacttccgggtagttcccactcaccaattgcctcctccggagtatcaagttgcacctgctgggctt

SEQ ID NO: 676 - DNA, 203 bp, Mus musculus
  misc_feature (1)...(203): n = A,T,C or G
gatgtgtctgccatgcnnatgggacgcacggacgcacggacggactccacaagcatccaccggtcactgtcgccgcccnnagtgactgtcacttcaccgattgcttantaantagttgcggacncctnagngnntgangtttttnccatcncnanaggacngacgganggactnnacaaggtgcgcgtgtcgccgaggccgcc

SEQ ID NO: 677 - DNA, 329 bp, Mus musculus
  misc_feature (1)...(329): n = A,T,C or G
ggccaagtagggaagagccattnctgaccacgctgcaggaacntctggnatctnnggccacagntnancngnctttccagtttntcgaggcaaagactgaaattttgctggnatcagcttgcactganttcctgtatgcaaaccaagagtcctggccagngttcctggggggaaatgcttttttcccntccttcatganactattggaacgctctaggattactgtactctcacttttggcaagccctttttatctgagccccctcntgggggttggtttcgctggnggttggnttggacctgaatccttgacctttcttgggtgagca

SEQ ID NO: 678 - DNA, 236 bp, Mus musculus
  misc_feature (1)...(236): n = A,T,C or G
gactgaggatctcttggaggactctggtttgtatcaagttgatataaaatcagccagcataatgaataaaggttgcaacttagctggagagaaaattagtgatttgaaaggcaagcctgaggaaatgatgctgggtgtggctcagagcaatgaagaaaacaagaaagaaaggtcnagaggtgttcagaagacagcaagaaggtccaacatatttgtaacaggaaccactgagaggt

SEQ ID NO: 679 - DNA, 266 bp, Mus musculus
  misc_feature (1)...(266): n = A,T,C or G
ggatgccggaacacctcctgcccctcacataaagggcagggccatgtgtgatcatcagtcacggagaggacagcagaagcagatggagagaggagacacaaggtgcagagcaaagaggtggttgtgctaanatgaacctggaaagaagcagccccacccccaagttgttcacagacacaagaggccccttctattctgtccaaccggtggcaggggaggacagcaacatgtatttaggtaaaagcctgacactgaacaaaaaaaaa

SEQ ID NO: 680 - DNA, 199 bp, Mus musculus
  misc_feature (1)...(199): n = A,T,C or G
cttgccccggcagccctgaagctgggacccttaccacagatgcatgtggcacaggatccaacagtgcttccagcacccttaagcgaactaaaaaaacacggccaccttccttgaaaaagaagcaagccaccaagaaacccacagaaacccccccagtgaaggagacantaaaanttcatttccctttggtttcttcctt

SEQ ID NO: 681 - DNA, 112 bp, Mus musculus
  misc_feature (1)...(112): n = A,T,C or G
tgcctgaaggatgacagacangctgcctgccctgcactnncatcnnggatgacagnaaacngctgatcgagtctctngactaantacgnggtattgtgtgagccctacaaga

SEQ ID NO: 682 - DNA, 417 bp, Mus musculus
  misc_feature (1)...(417): n = A,T,C or G
gactgagatagagtcatccccggnggtgatgcaaagcaggagggggaggctggattgtccaacccacactgtctctggaaatgcaggtcctgtgggaaggctggtacccaggctccgttctgagcaggctgttttaggaaaggagaactcaccagacctgtcccagngactctacctttgttctanaaggcgctcctttcagggttgnggtacctgtaggttagcagaccctcctcctttcccacccacccaagngnggcccannactaacccaccatctcttggnttgagccctggcagttctgtcttttcccgaggtcctgccctgcatcatggcttgcttcccggagcacttccccttcanaggtctacattctagggngtaggctgatttcttctgnaaagagatgaatgtga

SEQ ID NO: 683 - DNA, 355 bp, Mus musculus
  misc_feature (1)...(355): n = A,T,C or G
aggctgcccgaacccttggtggagcagcatganctcatgcagaaagctgcagtcttagaangctatgtgggaatccaagtcctcgctacactaantcggactgncactgatgagagtncaaggcttctcgnncaangcanaggcacagaaattatactaaaatggatgctcccaaaagaacaagcactaacattcggaagataaaagaacacaanggaccctanaaganatatcaccaaggtgcagcacacattaaagggtactaggtatgtggaatttgtttaaatattttaccaaatccctcactaataactgagttagataaaatccaaaatatatgttcacttatacttgc

SEQ ID NO: 684 - DNA, 165 bp, Mus musculus
  misc_feature (1)...(165): n = A,T,C or G
actatggcttcttccgagacatnagnttgnggcccccgctcgtgntgatcggcatctatgccacggccctctcagcctccatgagctctctcatnggngcctcccgnatcctgcatgcgctggcccaagatgaccttttcggggnnatcttggcaccagccaagg

SEQ ID NO: 685 - DNA, 360 bp, Mus musculus
actgagcctccagctcccaggttcattttacaggcgtgggccaccctgcttgactttgttctggctccggatgtggaaaatccccgagtgactgactcctcctctggagtcaagcgagccctccatggagacactgcacacggcctggagacctggcaaggggagcaaaggccatttggcttgtaggtggcagtgctgggactctatctggaaactggttttcagaatccatctgttctcttcaacgtgtgcagaggcgattccctttagcagaatgctttgtgtgttccagagctctgggtggggctgggcaacttttcaaaggtggttggtgtgaggcaggcacctgcccaaaaaaaa

SEQ ID NO: 686 - DNA, 439 bp, Mus musculus
  misc_feature (1)...(439): n = A,T,C or G
gactgaggtgggacttcccagganncagcangctctccacnatannagccangngnaggatcngacatgacagnnnaactacngaaagcnatgctacanggaagcagtanacattnaacanatgttgcaanagacnttnctcnctangagngggactggctgaatcctgctcataggagntngtacaggactgtggncgctggagaactaccggaacttggtctctgtgnnancttgcatttccaaaccatctctaatctccttattggaacatgggaaggagccttgggaggtgaagggtcaggtgacaggaagcagagtacaaggtgagaagtcangaagcagattgaaaaccgtttctagggaatggctctgncatctatcttcagaggtccttacctgggctgaggctgcccaaaaaactcttcctaagccttgc

SEQ ID NO: 687 - DNA, 249 bp, Mus musculus
agactgaggttctttctaaggactctgttttctgaactgaacctaagcgaggaccattctccgggctatgcactcttcactgattcatgcattgagaacaaaggatgaagaaaaacttggtcttcatgatattatgtttgatctcttagaaaataagcatgattatctaaacatttataatacatggtctgtacattgttttaaaaagcttttcatttgaataagagatatggtgtatggaagattttg

SEQ ID NO: 688 - DNA, 128 bp, Mus musculus
  misc_feature (1)...(128): n = A,T,C or G
aacaacagagcatcgagttgaacaggaggctaanaggagaggtccactgggcagnnnaaagacggcgtnctggctgggctanataganggcttagngnttaanagcacggactgctcttctgaagatc

SEQ ID NO: 689 - DNA, 451 bp, Mus musculus
ctgagctttggggacaagctgggtgcaatgactcagccaacaggaagaaggagattgctggcagccagcgtgctggccagtactaggaattcaagacaatacagagctaagcgtcaccttcctgctggtccatttgcccatacatccgtccagtcatccatctggccatccgccccctacatgtttactaggttatccgggaaggattgttaccatggatcttccagggcagctcacctaatccagatgatccctcacagcccctagtgtagttggggagagccgaggaccagttaccatcaaatcaagaaagaaagggcttcaaaggattgaacctatctatgcaaagggccagaggtctgtctccaaaggagggaacgttctgatggggcaccgaaggatgtgtatgaggctggccacaaagttagcaagaaagctgtgtgcaggaaaa

SEQ ID NO: 690 - DNA, 205 bp, Mus musculus
  misc_feature (1)...(205): n = A,T,C or G
agactgagaccccagntggccttcttggtctttgtcctgggaacagcactggaatgcaggaaaggcggaacctcanaaagaccaagatcaagcccagctcctgcctcctcttgaccccgagaactccggacagccaggctctgagcctcagcttcctcatttgcagagcaggatgctaataaagttttggagggtgttgggatta

SEQ ID NO: 691 - DNA, 346 bp, Mus musculus
  misc_feature (1)...(346): n = A,T,C or G
tcctcccaaacccatggacctntacagggatcacagttctgccctaaactctggtgtggagtgcattaaaaggagccaaggggaagatgcaccaaggccctgaatctgggctnaanancangatcgngggnttncntaananaccctncctgncagnngnanatggcatccgnnaaaggcnccctgaaggcacangtcangcagcctagcacagacaccccatgccacctaatggacaaaggtggaacttcatgagagagcaaaggtgccagtctattttcnngcggaaaccctctcctgagaaatccagcgcttacctgggcaccacantacaaagaccagactc

SEQ ID NO: 692 - DNA, 130 bp, Mus musculus
  misc_feature (1)...(130): n = A,T,C or G
atgcccttatgcctgcaccaccgaagccgtacaagattcttccactgccggggggcanccccctcgnanccgcgttanctccnngagatccaaaccggtccagattccatccgtgccacactgaggtgcc

SEQ ID NO: 693 - DNA, 370 bp, Mus musculus
  misc_feature (1)...(370): n = A,T,C or G
actgaggtcctctggangngtgggacttgccgcctttgctgccactgtggatgancaggttctacatatntatgggctgngccctgggccttaccctttgcntnngtgnccagatcatcaanaagcaggnnactcgntcccaggagaaacgtgtcccaggagctcctgatagctccctctcccctcagaagaagcagacacacgtttctggagtgaagattttttacggatctcagacgggcactgccaagggatttgcagtggttcttgccaaagctgtcacctctctggacctgcctgtggccattattaatctgaaggaatatgatccagatgacagtctgataggagagntcactagtaaaaccgt

SEQ ID NO: 694 - DNA, 242 bp, Mus musculus
gactgaggagctaaggggacattcatggtggtaacacagaaaactgtgcagtgtggctccacactcaagggactgccttctgggacaagacatcctgcttcagcggctgtcttcttgtggggtatcttccaacacgctcccccagaccaggactcaggcacctggatggtgggctctcctgactgtcatgaaaacctgtggacttggtaaacagccttaccttcatcctggaaaaaaaaaaa

SEQ ID NO: 695 - DNA, 208 bp, Mus musculus
  misc_feature (1)...(208): n = A,T,C or G
aatttatcttgaggataagancttttgggttccanttttgnaaaagatggnagtantaaaccanccaattcagtgangttnggannaannttttgtctactacggtgattacttggcatgactgccagcgcanttgnagctctggtnctcatgacctcttacattgaagcatgtggtggantcttngnacctggactacattctagca

SEQ ID NO: 696 - DNA, 125 bp, Mus musculus
  misc_feature (1)...(125): n = A,T,C or G
gactgaggccccatggcacagagaccagcccctgctcctccctggtgacttggctatgttgctgtgccctgaagggtgaggggatgttgtgagttgntgacagtccttttggttcacccagagtg

SEQ ID NO: 697 - DNA, 283 bp, Mus musculus
  misc_feature (1)...(283): n = A,T,C or G
agcccaggggtcttgnggtctacaaatcactctctgacttgaanaanngganctgnaattnatanagtgctatcacanaacatgngnngtccnctgatttggaaaagcactctctctgtgtccagctanctcancacattccctgaattgcggatggtngactnnctaagctcctcatgagccagccccaagctctgccaaagaatgcnnccngaaaaatgaacatttttggctcactgagagttcgtccaaacttatctantgctgcttcagagggactttc

SEQ ID NO: 698 - DNA, 194 bp, Mus musculus
gactgagtggtgagaagactgaagccggtaaaggtgcttgctgccaagctggaggacccgactttgatcctagagacccacacggtagaaggaacaacaacaacaacaaaaacaattcttgcaagttgtcctctgacctcctgatgccgtgtcatgccttcaataaataactaagtgtgatgataaaaaaaaaa

SEQ ID NO: 699 - DNA, 194 bp, Mus musculus
  misc_feature (1)...(194): n = A,T,C or G
gactgaggagtccctgtctttcctcagtggcctgaagcctgagaagtctgccctgaataggtcttctggctctgagctgtttatcttgtctgaagcttgnctggactcctgaagagaccagacttttgtgtgtgaatcatggttggatgcgtcaccttccctccagccactcaataaatgcatggttgccggtc

SEQ ID NO: 700 - DNA, 188 bp, Mus musculus
  misc_feature (1)...(188): n = A,T,C or G
aattccaactgagcccggatgactactantttntggcggggnngtggcgacaagaatgggagaanggggtgcaggtacctgctggagccggaggccattccagacccctgtggtgaggctcctcccaccactgaaaggcccccccacgcanatgtncncagatagncccccacttggtgagggtgccc

SEQ ID NO: 701 - DNA, 275 bp, Mus musculus
  misc_feature (1)...(275): n = A,T,C or G
actgccaggaggcatgtcngtnggcatgtatactggccncctgcaacgttctgatttnnagtacgnggaagctattanntgctaccgaaatgccctcaaattagataaagataatttgcaaatcttgaggnatctctctctattgcngattcagatgagagaccttgaaggttatcgagagacgagataccaacttcttcagttgcncccaacaccagcgngctttcctggattgnatatgccatcgcttatcattttgctgaaaagattatgat

SEQ ID NO: 702 - DNA, 126 bp, Mus musculus
  misc_feature (1)...(126): n = A,T,C or G
tctgcacctgatttctgtgcttggaatcctcaaaancgtggatatacagantatataattcaaagcggnttctcctncacacccctaggctcttgtggctgtgggngncacccacatatcgctgaa

SEQ ID NO: 703 - DNA, 134 bp, Mus musculus
  misc_feature (1)...(134): n = A,T,C or G
cctcggccctttctcccatggagnnccccaaangngaggntctttgcnnggggggncttgaaccatcccccaccacaggaaacccaagtnntcttncctcaccccctgtaaatccgccccctccctgcctttat

SEQ ID NO: 704 - DNA, 175 bp, Mus musculus
aggcatcctgagctacataacagagcttaaagacagcctgggctatctgagccctggtcatagacaagcgagtgttcaacggtctagaatggagacagcctagcctcctgctgtccaacacacctctcttctaggctcattcacagaaataaagtcccttctaggagactgagaa

SEQ ID NO: 705 - DNA, 146 bp, Mus musculus
  misc_feature (1)...(146): n = A,T,C or G
gtggctttttaaagctttattnctgncaaanacataaatanttcttgnggaactctcacnnntctgacaggangcatggctgcttccataaanctactgnctcgaanccacnaattcaanctcggtacccggggatcgaaaaaaga

SEQ ID NO: 706 - DNA, 229 bp, Mus musculus
  misc_feature (1)...(229): n = A,T,C or G
ggttgtatcgaggtgattataaaaactaaccagtacaaggaggaaagcgggagcgccagtgccctgcatatnacgangtaagttgctgagctctgccatgccctccctgccacaatgacctcagacaccagaagtccaaacaaacctttcttcctttaagttgttcctgtcggatgtttggtcacagcaataataaaagtacaatgcttatatttgaaagaccaaaaaa

SEQ ID NO: 707 - DNA, 155 bp, Mus musculus
  misc_feature (1)...(155): n = A,T,C or G
taccactattcttgattcttgaatgactgtctgcnaccagnattcanttctntgaagttttactnttcnntatantggngaaanagctgaaaaccnacnattactananaattctgctgggggggtaccaancctctaaacttatgtttgctaaa

SEQ ID NO: 708 - DNA, 194 bp, Mus musculus
  misc_feature (1)...(194): n = A,T,C or G
ttgtgttggggacccagcctatttangaaagacgacggtgcataaagaagagctgaggacgtatcctcacgctggnaangncacgtgcctgncataccggcaaattcnttgaaancaaagaaggganagtccagtgcatctggccganggaggatttaacttgaacatgactttatgtgaagtctcaaaggagc

SEQ ID NO: 709 - DNA, 258 bp, Mus musculus
  misc_feature (1)...(258): n = A,T,C or G
ctacacaaggtaccatatgtganaaatgaaaccttggcntacaanngtctgctgatnccttgattctggacttttcagcctttaaaacggtgttctgcttgtatatatncctgttgcaccttgtacatncagtgtgcccttgaagaccagaanaggccnttnggatccccttggaagctatagaaagttttngagnnggggggnngncccacttggnancttgaatcaagctnctntaggaaaacccaaccagaaaca

SEQ ID NO: 710 - DNA, 223 bp, Mus musculus
  misc_feature (1)...(223): n = A,T,C or G
gcatcccgaggaaggcgttcanaggcgtcacattcngtgaanaacctgaactgnggtggnggccacaggctatggacctgttctcttgctgactgtaccgactctgaggctggaacnggagangaanctgaggtaaatgagcatcantgangtggntggacattcactcattggacatntaaaaggggaagatagactntttttttngcgcgggcaacaccca

SEQ ID NO: 711 - DNA, 220 bp, Mus musculus
  misc_feature (1)...(220): n = A,T,C or G
gaggccatacttacttcttgngagacannaanataccctnncctgnngcntgggnngacacctacatgngcactcccatacatgaaaaaaacaagctcntaaccnantaantaaataatctctaatacaatctaaccaaaggaatncaacatggttaactaactacaaactgcggnccngcccccntggccggggataactttttttaaggggggggggc

SEQ ID NO: 712 - DNA, 389 bp, Mus musculus
  misc_feature (1)...(389): n = A,T,C or G
aactgaggatgcaaagctgaaaagaaacaaagaatatcctctcgttcatgatcttacactccagtgacagacgacacacctgtgggatgacagaattctttctgcagatgagagaggacaatgagcaagtggaaacacaggaagacgcaaacaaggtctgcagataattgaacaaggaggagggatgcctctggcagtcctagaaaggagatgatgcacgccgcctcccaactctgcactcagtggnttacagggtagcttgaacccagtgatgaggggactatttacngccactgagattagcaaatgntacataccccattttccttattgnattactggctgtatattaaatttaaaagcatggcatgncactgggaatagcataa

SEQ ID NO: 713 - DNA, 264 bp, Mus musculus
  misc_feature (1)...(264): n = A,T,C or G
tagatagtacacctaaatactccgcccttccccaggggcctgtntnaacacaagctgggangangggggacgnactaatgactgatgagaaaggcanngaatcactgatcttgnaccaaanagatccttggaaagctagnncttntgcctncaggttcctggncccatagtganttccagtccctgacttgcttttgntgatgaacancnantntttttntcagggggggggagtaaaaccctnttcctccctaaaaaaaaaaa

SEQ ID NO: 714 - DNA, 227 bp, Mus musculus
  misc_feature (1)...(227): n = A,T,C or G
aactgaggtctcctaattnacaagnnacaattctggcaacttgaaaggcatccgactcgcgccgcagggtgtgcgcgccgnctgccgggcgccagcggaactgcgcccaggggtgtgaagtcatgaatcacgaagtgtatcacgaagttaaagtacaaggaacggacactgcatgaccacatcattttcagattgtattgacacttttggatcctgaaaaaaaaaaa

SEQ ID NO: 715 - DNA, 181 bp, Mus musculus
  misc_feature (1)...(181): n = A,T,C or G
actgagatggtggactgtttgggcaggatcaagtangggtcacattgttngaaaagganaantactattaagtgtgctttaaggnttcanangccttnnttntcctatttatctntctntgnctcatgcctntgggtcctctactgccccagcaccttncctgcttgccttgcttgaacca

SEQ ID NO: 716 - DNA, 105 bp, Mus musculus
  misc_feature (1)...(105): n = A,T,C or G
ctggcacggcactgttganagtacccgaggcttgancntgttagatanncccgnagtntngctgacnaacangcaccaggagaccgacggtatagcaaaaaagaa

SEQ ID NO: 717 - DNA, 105 bp, Mus musculus
  misc_feature (1)...(105): n = A,T,C or G
tgcttacctgatggcctttacagtcnactgacctgaaagcaagtctgcagagtttagttcagcttctctgtttcaggttcataaagggccctgtcccctgtcccc

SEQ ID NO: 718 - DNA, 104 bp, Mus musculus
  misc_feature (1)...(104): n = A,T,C or G
ttgggcctgaagtaagagntctggggcagcaggccataancacttcttntgntnntttttttttttntacaggaagnatgggnggctccatataaaagaaaaaa

SEQ ID NO: 719 - DNA, 167 bp, Mus musculus
  misc_feature (1)...(167): n = A,T,C or G
agtcttcctacctaggnaaagttttgnctgccacatctgtgcacatctgcagcttcctgcaagaagctacctgctgagcagccgagctngncttcctgaagagaaagtggnancctggcacagtggggttttntnnttcccngggggctttaaaagatcagacgtta

SEQ ID NO: 720 - DNA, 239 bp, Mus musculus
  misc_feature (1)...(239): n = A,T,C or G
gactgaggatcaatgtgactctagaaacaaatggctgaangaatatccatatgaagaggaaaaccataaaggctggctactcaccgngtntgcaccagaagnggcactatnctctngagtgggacactgtgcatncccaanancntgtantctgactgaattanacagcagnnanatcagtggtagcaggtcaccagtatgcaancntcanctgttctttctagaccctttaaacctac

SEQ ID NO: 721 - DNA, 216 bp, Mus musculus
  misc_feature (1)...(216): n = A,T,C or G
tcttataattgtaggcaggacccactcctagctgggtatcccagactgtatgaaagtgagctgagccgaagnctgcattcatccatctctgcttcctcattgtcagcgtgctgtgagcacctgctccaagcgccgtggccttgatctccccacagtgacgggtcggactttgaactgtgagctgaaataaactctttcccccttacaaaaaaaaaa

SEQ ID NO: 722 - DNA, 175 bp, Mus musculus
  misc_feature (1)...(175): n = A,T,C or G
tttttttttttcctcngtntttaacaaaacaagctacaggaactgaagcaaaggaccttgaaaaccatcacaatnactgcgttnnnggcanggnnncaaatncaaacatagcancaatgantgaagacgctcgctctaccatttcaacctcagcactagcacacacgatttccct

SEQ ID NO: 723 - DNA, 186 bp, Mus musculus
  misc_feature (1)...(186): n = A,T,C or G
tctggacccacagcaatgaggcagcacagtgcctgtactgaacctccttcagcacaaggccagacatccttcccctagcccctgcctgccctgcctccagatgngaacacgccacagctnggagaacctggcctgacaagcctgncactgaaacacaaagctgaactggagggagggggctggcca

SEQ ID NO: 724 - DNA, 531 bp, Mus musculus
  misc_feature (1)...(531): n = A,T,C or G
atctgagatgacctgtgtattggtgagacggcgtgtcaaagccacctacagtcttctattgtgcttaagctgtggatttagacctggcttttcaacgttgggtgcactcatgtttggtgtgttaatccgtggcttgtcgctggtgtgcaagccgtgttgttgccacagactctctgtcagctcgcactacgctctggagccccacattacccatcacaggtctatgtcatgtccggctgggggncttcctcttctccactgctgcctgacccttcggatctcagggacaaggttcgaaactctagccaattaaaacaaatacagcctaaccgtgcacaggaatcgtcagctgcacagtgccagcactctgaaggctcgccatgtggcaaatgtcaccatatctgtctgtctctcggtaatggaacaacaaaggatgctctgactgaaagcctgagtgggctgggtagagctcanctgacctagtgctagcttaacacatgggatgctcctgtacttcctaacaaggcatgg

SEQ ID NO: 725 - DNA, 157 bp, Mus musculus
  misc_feature (1)...(157): n = A,T,C or G
aagatgggaggtttttttactcacaacaggaaacacaacttaaacagccagnacccgttagttttgggaggatgaaaaacccccgagggacactggggaaggctttgccnttttgggccccaaggaacccaaggatttacntagggcttggcgaaaa

SEQ ID NO: 726 - DNA, 228 bp, Mus musculus
  misc_feature (1)...(228): n = A,T,C or G
gactgaggtgtctgcaaacacccaggagnngaaggtagacctagaacagcacctggcccggctcagcgagatcattgctgcccggggtgactacatccagaccctgaagtttatgcaacagatggcaggcaatgtcgtcagccagctctcggggctgcccgtgtggagggaggtcaccacgcagctgaccaagctgtcccaccagactgcctatgtggaatactacag

SEQ ID NO: 727 - DNA, 203 bp, Mus musculus
  misc_feature (1)...(203): n = A,T,C or G
tattgttccccttttcanggtagnaggagggttgccaaattgttccaaacccgggcccttaattaaccaatccccagggggggggngccaccttnggccgggaccggtttttcaaccaggganggggaaacaaccttgggcccgggggggccccccaaacccccaccaaagggaacgggacntnccaaatttaggggaggggg

SEQ ID NO: 728 - DNA, 238 bp, Mus musculus
cagcctgtgcggtctgtgaacagttggagagacttgttacgtttcagtgggcatgggtgaagatgcctccgccttccatcctcaccagctgagattctcccttgcctgctatttatatgaaactcctgggaaaatggctatagatgtggacttagtgtcttgacctcatttggcaggaacaaattctgaagaattactaattgatgaaaattatcaatggctaccatgaaaaaaaaaa

SEQ ID NO: 729 - DNA, 317 bp, Mus musculus
  misc_feature (1)...(317): n = A,T,C or G
gactgagcttcttggtattcctcttagagtcgcatgccagataagacgttattgctgaagataccacactctttgcaagatagagagaaaactggctggaaccgagtgggaaacttctttcctgttgtctgactttcatagctcctcaaagtgctatgtagacagatggagaagaaaggcaacgtggatttaacccagctttgaaccctacaactacagtagcaaacttctgccaggcaaactgaaaagaagtaagaaaaattaaattagtaaaggaaaatgacatgttgctcactgnatagggcattatccccttg

SEQ ID NO: 730 - DNA, 249 bp, Mus musculus
  misc_feature (1)...(249): n = A,T,C or G
ggtggacatgaactgntgaagaaacttctcancacaccctgaagaaacagcctgggaaaatggagatgcttctacactcccccccngcccccccaagtggatggcanagntntgctgcccaggatccctganttccaggtgcctgcttgctgtccannatgggggcccatgccactntatgttgctgctgtaaacgtgcagtgacaatacagaccctctggctcctgntgctaccttgaaaaaaaaaaa

SEQ ID NO: 731 - DNA, 119 bp, Mus musculus
  misc_feature (1)...(119): n = A,T,C or G
gattttgctgttagccttgacttggtctggaacttgcctcaaattctcaaagatctgcctacctgngcctccccagtcctggaaataaagncctatctaaccatgcccaaaaaaaaaaa

SEQ ID NO: 732 - DNA, 358 bp, Mus musculus
  misc_feature (1)...(358): n = A,T,C or G
caccccctctccaccacccantcaaaagactggggccggggtttaccttattgggagggcaaanaaaggccnagaaaccaangnnaaggaaaaaggtgggnaagggaagggtnaccttangnaaagtaaancaaggggaaaggaagngnaattcntggttggggtcgggnanaaaaaggtttctttnggattcnggcccgaagtttgtnccaaggggcccaagggtgggcaattattcctttctcaaaagnggggaaaggggntttcttccacaatgaanggaccaancccctttgggggaagccccccaaagaanaaattcttggganttggccccctgaaccctttttttggcttg

SEQ ID NO: 733 - DNA, 101 bp, Mus musculus
  misc_feature (1)...(101): n = A,T,C or G
gcataggagaaacaccacacccgatccaggccagccagancaagaacaatgagactcctacccttaaataaataggtaaaaaccaaacaagaaataaaaaa

SEQ ID NO: 734 - DNA, 108 bp, Mus musculus
tctctgtattttattatactccctcgacttctccctattttctctcatggtgtgcttataaccaggctcttagcctccattaaacagaccttgacaactaaaaaaaaa

SEQ ID NO: 735 - DNA, 191 bp, Mus musculus
gactgagttcgtgcaggtaaccctgacttgtggcgcaagacccagtcctggagaacaagaagccacccaaccaaggtaccaagagatgtcactgggtagcaacctgtacacatccttgacacttacaaacctggaagtcactagaagctgtgacaataaagttggcattttccctcactcaaaaaaaaaaa

SEQ ID NO: 736 - DNA, 152 bp, Mus musculus
  misc_feature (1)...(152): n = A,T,C or G
gcaggccttgaactgtgngtgtgaagatgaccttgaactcctgatttgtctgctttacactcactgagagcaggaattacaggtcctgcactggattctcttaatggacggtgaccacggacatgtaagccgaataaagtctttcatcccca

SEQ ID NO: 737 - DNA, 109 bp, Mus musculus
  misc_feature (1)...(109): n = A,T,C or G
cttctttggtagaccttggcccangaccnaganactactatttcccctactggagancaatgatgnggcccnggggcttcagnnnatgaanccaaccagccacgtgaga

SEQ ID NO: 738 - DNA, 120 bp, Mus musculus
gactgaggcttgccattcaagtatgtgacctcatggctccctgctgctgccatgcctgccacttttatgcctctgaaactgtaaggcaaagtaaactctgtcttccttacaaaaaaaaaa

SEQ ID NO: 739 - DNA, 242 bp, Mus musculus
  misc_feature (1)...(242): n = A,T,C or G
aggttttttctttcttggccccgcnttttcttggggggggaaaagggnaggggccaaccgcaaatgggattggctnggttttcttggaaagaaggggcctnggggagcccagcaaagggggttggcccagcaaggggccggggattccaaggaattccatttccggaaattanttccttcccaaagggcccaggcccagggggttttgggcctttcctttttcntttttaaaagggggaggg

SEQ ID NO: 740 - DNA, 120 bp, Mus musculus
  misc_feature (1)...(120): n = A,T,C or G
cttgttccacgcccccatttgcctaagatggcatatcaaatggttcagtnngctcctgtcctgctgaggaagatgttgaacatgncccanttacacagctgncattggggctgcccccta

SEQ ID NO: 741 - DNA, 108 bp, Mus musculus
  misc_feature (1)...(108): n = A,T,C or G
acaggaacgaaaagggcntcattatctcttgngaactggagttaaggacngntgctagntnccatggagcatgctgcnaattgaaactagggccttctgtgagagcag

SEQ ID NO: 742 - DNA, 126 bp, Mus musculus
  misc_feature (1)...(126): n = A,T,C or G
ctactgagccttttttttatnctctcccagcaggncagggggnacatnanacaaatatncttcnttacgctncctagtatntctcnactgaacacancactgtaatactatagaatatctacttta

SEQ ID NO: 743 - DNA, 124 bp, Mus musculus
gactgagagaagaaaatccaaagtaccaaaatggtcaagacagacttatcgacatttctgatcatctgtaacatcagttccgtgttccatcaattaaaattgtttacaaacttaaaaaaaaaaa

SEQ ID NO: 744 - DNA, 153 bp, Mus musculus
gactgagatgggatttttgcatcaatctcctacatccacctcctaagtgctggggttggttacaccagaacacccggtttatgtgggtgcagaagatcaaaccaagagacttagtcacaccaggactgagcttcaacttcatttccccaaagt

SEQ ID NO: 745 - DNA, 125 bp, Mus musculus
  misc_feature (1)...(125): n = A,T,C or G
aggacccgactttgtttctattagacncacncggnagagggancaacancaacaacaataacaatncttgcangnngtcctctgacctnctgatgcngtcgtcatgccttcaataaataactaag

SEQ ID NO: 746 - DNA, 186 bp, Mus musculus
  misc_feature (1)...(186): n = A,T,C or G
agcggggcgccgcggaggcngaggacnacatccnggtagatgctgatntgngcngagggcacagnnncgagcttgctggnaancgccttccgttctgancnctcacatcctgtcacaggnaagggnctgagcaccggnactgccctccctcgtggccagcagccccatgntctccatcaccctaga

SEQ ID NO: 747 - DNA, 152 bp, Mus musculus
  misc_feature (1)...(152): n = A,T,C or G
caagcgccttccgttctngatccntcacntcctgtgcacggcaggggcgtgtgcaggnatactgncctccntctgcccagcagccncatnctntnnatcaccgtngagccccttagganccaacttgaatgtngtgtttttttttgcggggg

SEQ ID NO: 748 - DNA, 222 bp, Mus musculus
  misc_feature (1)...(222): n = A,T,C or G
gaacggacctctctganatttcaaagacccanagntcacatcntttgactacaagannatggaggaaaagaaaaaaggcatgaaagaaacaacggatgctganccaaggcgcatagcttncttttccaatggcatcgaccccagcctaggngaattctcttatggccctggaagaatgacagncctccttcccttactcnntttttaaggggggggggcact

SEQ ID NO: 749 - DNA, 241 bp, Mus musculus
  misc_feature (1)...(241): n = A,T,C or G
gactgaggccttcatgatgacactcctgctgtgangttcttccctgagcaaaaagtacagcggtacacaggacacctnatatgtctcttgggcagntagacccaaacctgtgtcattcccaatgtccaaacatttaggtaataaactcgggactgaaaatgtggacagagaaacaaccggnaagtcaggctctatgaagacatctgacatcgcattaggggagttaggtggctcaccctac

SEQ ID NO: 750 - DNA, 208 bp, Mus musculus
  misc_feature (1)...(208): n = A,T,C or G
tagcctgactagctgcctagagagcacatggnagcntatcttttgttntatgagcnggggngaaacaagagtgctcacattntagccaggcgagggtgtagctcactgaggacctcanagggnnngcctgttaaactnccatatcaattttctttactgatagncatagccttanaaaatgttcaatancctgggcgtggtagccgca

SEQ ID NO: 751 - DNA, 306 bp, Mus musculus
  misc_feature (1)...(306): n = A,T,C or G
tttggaggctgaagcaccccaggcaagaagatggngaacagagtctcccgcaggatgannatnggatggccnnctgngggggccancnanangncttggagatctgctactccntcccctcctgctcctggaacccgacacacagcncctagaggccccgttctggctccctgctctccctggagactgagctccttctgaacntagaggccaaagcccntttttnnccgnngagnggaacagaggggcacctttcacacccccgananccnancaaaccttagngccaaccccacccccccccac

SEQ ID NO: 752 - DNA, 169 bp, Mus musculus
  misc_feature (1)...(169): n = A,T,C or G
tgagaagagggcatcagatactacaacctggccatcagcccccccccccntgcctgctttntntccggggaccccacttttcnggnnccnccnnngcacagaatctcaatgaattatgcctgngagctgnccccaanaaaccngcctttatatactttaaaaaaaaaaa

SEQ ID NO: 753 - DNA, 344 bp, Mus musculus
gactgaggctgtcgcttgttcctacggctgcatggttgagttcccagctgattctcttgcctccacctcttcaggagcactgggattacagactccctgggttctgaggattgaactcttatcatcagacttgagaggaaagtgcttttatctgctgagccatctccctggctcctccagtctttagaaatgtgaaaaatgaatttctatctgacttcctatctattctttggtcatttcattcatgaatacaatgtgtttgcatcacatccacccatccttcccttctttcaacttctaaacccttctacttcctcaataaacatctccccaaacaaaaaaaa

SEQ ID NO: 754 - DNA, 231 bp, Mus musculus
  misc_feature (1)...(231): n = A,T,C or G
actgagataagaatgaacactcagctctttctccagngcccggactgcctgcctgcctgcctacctgctgctgccgncgacatgantcntgntagnctcaaagnctntagaacnatcacatgcccatattaagacgctttctttnataaagngcgncntngntanagtttggcntatcacagcactagaaaannaacctaagacagaagttgggcacccagaaaaaaaaaa

SEQ ID NO: 755 - DNA, 108 bp, Mus musculus
  misc_feature (1)...(108): n = A,T,C or G
cctgccttagctcccccngggcctngcngtccactgcctatggaggccacctcnnagnanntctctccccangcatgctctttctccacaactttgcttcctcaagcc

SEQ ID NO: 756 - DNA, 103 bp, Mus musculus
gactgagactcctccttgatttggcaagtctactctcaagtatttatttattcaagaaaaatgaagacattcatccacaaaaaaaattttgaaaaaacaaaaa

SEQ ID NO: 757 - DNA, 342 bp, Mus musculus
  misc_feature (1)...(342): n = A,T,C or G
gactgagttggctggncaagatattcctgcatattagttcagcaacccttccccacttgccaggcatcctatcgtctgtgcacactctgcacgaccagctgccagctgctgccttcacagtgcaaacactccagatacagagagctcctcgtgaagaggaaaatgccaagtgttccacatctggcctacgcttggggattggagagatcagcacagtagcaagtctttggctcactcacagctctggtttcttaattatagcaactctagatggatacctctcatggatgctccccacacttgttggncaggctgagcttgaattaaatagaaagagtatta

SEQ ID NO: 758 - DNA, 103 bp, Mus musculus
  misc_feature (1)...(103): n = A,T,C or G
aaacatcatttataataatgtccaacactggnaatgnactanagaggaaagtcgaacctttgtcanaagacacacatgagatggtagatcgagaaaaaaaaaa

SEQ ID NO: 759 - DNA, 258 bp, Mus musculus
  misc_feature (1)...(258): n = A,T,C or G
gatccctcacattctgtcacggaagggnctgtgcagggtactgcccttnntctgccnagnagncccatctntncatcaccctngagccccntnaaggtcccaacntgaatgtctagnnttttcccttgctgnaggacacttcttctttnctgggggcaanccaggaaactctcaaacagaagngggaggactggnanggcaatnatcccnnaaagctgtccaaggcctggncactanggcattgtaggggttaagacc

SEQ ID NO: 760 - DNA, 519 bp, Mus musculus
tgagactggccttattgttgcgtgctaccatggctttgtggataccgtggtggccttagcagagtgtccccacgttgacgtcaactggcaggacagcgaagggaacacagccctgatcactgctgcgcaggcagggcacgtcaccatcaccaactacttgctgaattatttccctggtctggacctagaaaggaggaacatatttggattcacggccctcatgaaagcggccatgcagggcagaacggaatgtgtgcgagcccttatgctggcaggggcagatgttcaagcaagggatccccgtcgtgggctgtcaccacaggagtgggctgcgtacacaggccgagcagaggctgttcgcgtcattcagaggctgatggagcgaccctgtccagagcagtttggggacaagtacaagctggaattgccacttcccgctgaggcggttttgaagaagtcaagttccaaaaactgcttgcagagattcaccgcgttcctgcggtccacttttgacctctc

SEQ ID NO: 761 - DNA, 138 bp, Mus musculus
  misc_feature (1)...(138): n = A,T,C or G
gactgagggtatccattganacctgtanacaactgcttgtggtncagttgattcannaggacacgcttcctttanagatggcgggggaactttcacntgtnanaacactgtcacgccttaacgttcagttactgcgca

SEQ ID NO: 762 - DNA, 273 bp, Mus musculus
  misc_feature (1)...(273): n = A,T,C or G
ccattacttctagaccgaatcaccaatgagattctnagcnctgtggcgagcangatgagagccacaattgtagctgctcanactgtatgatanngcggactaanacacatggtgacttttcaaaagcngntttnntgccnagaganggagctcagttganagagtccttgtttagcgcgcaagagaccctgcgttcgntnctcatcacaggtaaaaactgggcnaggtaaccccagcacttgggaggagggantacgagaatcagaaattcag

SEQ ID NO: 763 - DNA, 158 bp, Mus musculus
  misc_feature (1)...(158): n = A,T,C or G
aagccctgctctgctgccngctagctganangaaggccagagatantancgtctcngaancnaaaccagncnnctgctctgcttctatgtngatgaaggacacagantntaactctctgaaancaaaccaataaactttttcttctataaaaaaaaaa

SEQ ID NO: 764 - DNA, 222 bp, Mus musculus
  misc_feature (1)...(222): n = A,T,C or G
tgctgcgtacttagggagtacangacctgctaatggaaagctgaggagaancngccatggacctgctaggctactccttnacagaacccacagnccggagccccatctnttntgaccaccgtctatgangcgcatncctggcgaaggccagttacttggagcacttgtgaagcgacctattagagtgtgcacagttanctgnattnatcagagatgttattt

SEQ ID NO: 765 - DNA, 154 bp, Mus musculus
  misc_feature (1)...(154): n = A,T,C or G
ggcccgaggatgaagagctcactgggcaccgggtaagatttctgcantctttacaagaagtgacctgctgggagtnnccccagacactatgcacagttatatcattttattgaataaaaatcatcgatgggttgctgaatgttaaaaaaaaaaa

SEQ ID NO: 766 - DNA, 104 bp, Mus musculus
gacctaaagcctgtgtttcacatctatccaactccattcagggagacctagatggcagagaacacgtcaggaataaattcatccctcctgtgtaaaaaaaaaaa

SEQ ID NO: 767 - DNA, 135 bp, Mus musculus
  misc_feature (1)...(135): n = A,T,C or G
acgactgaggaagaganaaccntgttacntagaaggatggngtgattnatgcancacngtttaangggtgtttcacacctntgtggaatgcangaggcaccatgatttgaaggtncnnctatactcaagggccag

SEQ ID NO: 768 - DNA, 134 bp, Mus musculus
  misc_feature (1)...(134): n = A,T,C or G
ggactgagtgtttgcctctngctgtgatgatttggccagactgctttagaagataaggccccttgatcttggacttccagtgtccagaactatgaagcaaacatcttctatagtttaaaacttaaaaaaaaaaa

SEQ ID NO: 769 - DNA, 163 bp, Mus musculus
  misc_feature (1)...(163): n = A,T,C or G
acacctcatcttgaggtntagngaatagagagcactctttgcctctctgacgntgctctggtnttttcagaagcancacttggganagtgnaagangtntancctgtaattagggatatgttgtgccactgnatnacaactttggnggaccacctgtaacttt

SEQ ID NO: 770 - DNA, 312 bp, Mus musculus
  misc_feature (1)...(312): n = A,T,C or G
gaactgagttcctgcgggaggacaagnntaggactacctatgactgagccgggcatccatccagacaccgtggaacccaacctgacacggtctctgcaacacctagtcagcatgaagggcaggaggaccgtgacgcgcctgggaccccaattggacatctacatccctaaaggtcttgcaggctcactgcccagttcagatgggcgggcactctgagcatagagcaacagcccttctctttctaactcctactctacagacctttgcaaataacctgaataaagggcaggaaggaaaaccagaaaaaaaaaa

SEQ ID NO: 771 - DNA, 236 bp, Mus musculus
  misc_feature (1)...(236): n = A,T,C or G
gcccagtgcagagagangatcctntccgngcagntcccctncgaggtgntgatccgngcgccgntctcctngcggatcctcttgacnagantnccntttcttcccgatgangctgcctacttnnttttcgagnatnagcagccagaangagcaaganaatatccagagagatgaagnaaatgacnnttttgttacacggggatggaacctatatcttcctgattctgtctactggg

SEQ ID NO: 772 - DNA, 116 bp, Mus musculus
  misc_feature (1)...(116): n = A,T,C or G
agatgatggtctggcanacctgactgaanatggntggggcntgaggccatgnancggctgnnaatgttatcactgctcatataggaaagattncgtntnatcttgaggtgccggat

SEQ ID NO: 773 - DNA, 232 bp, Mus musculus
gactgagagcccctgtaaatgagacagcacacagtaggtatctgggccctggcaccatgggaacaggacagaaggaaggagagtctcttgcgaggggctaacggacctcatgtgaattgagaatgcagctgaattgtgttaagtgtggtggaaggaaaatattatgacaaaagggaagatttcagctccgaaggcatccaacgtggcttttttttctttctttctctctgca

SEQ ID NO: 774 - DNA, 117 bp, Mus musculus
  misc_feature (1)...(117): n = A,T,C or G
tttttttttttcttcntgcacacagtggcngacatgcacaagaccagacacntnnnataaatanttctanaataaagatgaagaagaagaggncggaggaagaaggaggaagaagaa

SEQ ID NO: 775 - DNA, 173 bp, Mus musculus
  misc_feature (1)...(173): n = A,T,C or G
gactgagattgggtgtctccggtagtgcccttgacctgtggtccaaggaagcccttgattctctgcttcttctgcttacctcaagnacagggattagagtagacctacatcaccttcccagcttcattccaggctagggaatgaaccaaaggattctggcctgccaggtcaga

SEQ ID NO: 776 - DNA, 237 bp, Mus musculus
  misc_feature (1)...(237): n = A,T,C or G
gcggtccgtccaagagcgggcnccacacgggtaatcagtancagctnctgnttncancaggancgtacngattctgcggnattggcanagaaccataagcggcaggattcangccngaatactacaagaagttctttggtgcatttctctgtgaagtgaagaccaggagaggccacgnnngcattcgcatggtgtcacaatgcaagagtagatctcttgatttttttttagaagggg

SEQ ID NO: 777 - DNA, 158 bp, Mus musculus
  misc_feature (1)...(158): n = A,T,C or G
ctgcacatatgtgtgngtgcaccatgtgttnttggngcccatgaaggccaaaagaggacatcacatccctggaaacnggngttattgatggttctgagntgganagtnanctgnnatccttggnantgagctacangtacccttaactgctgagccgt

SEQ ID NO: 778 - DNA, 139 bp, Mus musculus
  misc_feature (1)...(139): n = A,T,C or G
ggatcctattacgggatcttgntnctccaccagcanaaagagaagggtaggggactgntgaggnctttgntactgctattggngacggtctggcactactatgtnaaggcaggctttctttttgctttaaaaaaaaaaa

SEQ ID NO: 779 - DNA, 169 bp, Mus musculus
  misc_feature (1)...(169): n = A,T,C or G
gcgcacagcgaagaagactgngactgcatattgatttctgcctccccatctgcttcggaagcaggtactgagtacatcagaaacaatagcgttagcgctcacggggtcgccattaaggaaaaataggtttatcttaaaatatccttttatttgttttgttttgttttgg

SEQ ID NO: 780 - DNA, 254 bp, Mus musculus
  misc_feature (1)...(254): n = A,T,C or G
ctggaatcccaacacgcccttcgaccaagngtcagcctgcaagggaagctggatttcctgaatgtggtctccaccgatgggcttttgtgtgctctccaggattgtgatgcgatcaacaccgactgcagtgaataaccttgtataaatgtccttctacacattaagtgccaattcttcaatatgccaggttcccagaagaggagttactntttcagaggangcatatatttatttataattttcaaaaaaaaaaa

SEQ ID NO: 781 - DNA, 114 bp, Mus musculus
  misc_feature (1)...(114): n = A,T,C or G
gactgaggttgtgaagtggagccagctctggagtaagacacctgaccacacagtgctctaagcctcttctgacatctctacgtncagcggttgtctgctgagcatcaggcatgt

SEQ ID NO: 782 - DNA, 448 bp, Mus musculus
  misc_feature (1)...(448): n = A,T,C or G
ctgtgggatcccaaccaanggctacattgactgacttctcaggcttgccttggtggaaacctctgnatcctgcgattgttgcattctgcacacctacnaaggcagcatcatgcanacaacgccaaggtctgccccatgctctactgcagctggtttcctttgaccacggtagcagcancctccaaatacgctggatacctgcgcaaggcgaagggaatccagggaaaatggcttcctagctgagaagtcnanngtttngacganngaaggntatggangnagccngtactatgaangacaanncgtatccatatganggctannctncttactgacngatnganngccnaatacantncntgtntgntcaaagccagcactggctatttcctatnagnatgcattancantaanatattataaggaaatcaacatgctcattgcccta

SEQ ID NO: 783 - DNA, 285 bp, Mus musculus
  misc_feature (1)...(285): n = A,T,C or G
aggggggttgcttccncntaaatttttncaccaaaggaaaaaccaaattttcttgggccaacttttgggaaaagggccatttcccggnaactttccgccggcccccgccnaangggngttggttgggccggccngcccccggncctttgnccnggggggccggcccaagccgggaaaacttggcgccccaangggggtggnggnaagtccattgaaatcaccgaaagtngtnttcaccgaaagtttaaaggtnccaagggnaacgggaccccccccttggacccc

SEQ ID NO: 784 - DNA, 104 bp, Mus musculus
  misc_feature (1)...(104): n = A,T,C or G
catatttcagcacataanaggtccaaanttccnngccncgcantcacatgggtgngtcncacccatcctcttacangatcatgactgnctgttctggagtgact

SEQ ID NO: 785 - DNA, 376 bp, Mus musculus
  misc_feature (1)...(376): n = A,T,C or G
gactgagaggctctgttnnagccttgctgtatagtacaagagagcnccttagttncaaggatganaagatggcttnctgaagaggancaagtnctaccaatcacanactatganaggtgccanagggttgacttccaacaggaacttcanagactatttcagcaacagaccctggattgtaccatactcanactatttaaaggaattactttcactttccnatgtaatatggttcttaactgacttanaaaaggaagactgcttnatancananggtaaatgaagagagatgagtcttggtaagaatgggaatagtaagaaacanaatccctttgagagagattataggcaccatcttttattatgatagaaccca

SEQ ID NO: 786 - DNA, 463 bp, Mus musculus
  misc_feature (1)...(463): n = A,T,C or G
tattggaagagccaagacanngtncataaataacaaagaagancctagccgtgtggnctggtagcncntngcttccggagatttatgacgagggataggaggagcacttgccctgagtgtatgaggcatcagggtcaatcctgcatctctctgtgtagtcctgggtttgcttacaggacaggctggaacacgaggcaggaatgggacgtctggtaaaaacaagcagcagagcaggagttggtcacagccaaggagatgcactgctgctcaggaccccgatggaggagcagccatggtgggaaaggcccagaacaagatggcacatgtttccagagccctggaagtgtctgcagccagcccaggtcccctcactcttggaagaagggtcacaaggcaactggatcccctgcccgtggcaaagcagagctaaactagataaatgtttcctccttaaaaaaaaaaa

SEQ ID NO: 787 - DNA, 104 bp, Mus musculus
  misc_feature (1)...(104): n = A,T,C or G
gactgagcttgtacaatgacaggcccgggcagcccagataagctctcgcccttgatctcctctttgccatcccnggtgccccctctaatttttaaaaaaaaaaa

SEQ ID NO: 788 - DNA, 301 bp, Mus musculus
gactgaggaaggacagcagtgtcccagcatgcaaatggaagccagaggacaactttctggagtcccttttctttcacctttatgtggggcctaggatctatcccaatttgggtggcggagtcttactcttacctgctgaaccatctcgctatccctagatattacgatatgtaaattgtgacccagtaggtttggacggggtctgacatctacatttctcctgggattttctgttgtgacttggaggcatgctaaaaccacaatatcttttcaaataaatatgctctcatgaaaaaaaaaa

SEQ ID NO: 789 - DNA, 211 bp, Mus musculus
  misc_feature (1)...(211): n = A,T,C or G
tgttaaaagggaattctttacccnntgggttttnggtgcccagggggganagganaanattttaactngcttaacttttttnaccannggccctttnccanaaaaccaggggaatttgtcangacnccgggcttgggggnaatgganaaaaaagccccggggattccttttggaaggngggccccttggaaagnaaccccaaccccttttt

SEQ ID NO: 790 - DNA, 319 bp, Mus musculus
  misc_feature (1)...(319): n = A,T,C or G
gactgaggttcctgtcagttacctgctgtgccgtaggatcctgtggagtgtatcgngatgcctgagtatcagacaacggcagccagnntaccnanattnntgccgcntntaccttgngnncgnncnttnnagtgagnccattnactggctaaantncacnagtaagagggcacggggtgccgttccngcgncnnttagagagctaccatgtgnttgctgccatttgaactccgaaccttnttaanagcagaccatgctcttatctactgagccattanctccagccccatgctttgtattcttatagaaaaatcaatgc

SEQ ID NO: 791 - DNA, 270 bp, Mus musculus
agactagcccggagctgtggtacctaccatggctgtgggtcgccttgacaaccagcataagccatcggagaggatgaaggaccagccgctgagcaggagcaaaagcctatgcttgataactccgggacagcgacagacccaagaccattggattgtctcttctgaaggctttgtgctctgacagatagtgcctttccagcaagcaaagactggggcagggcaccatgtttaaactccaaaataaagcctatcttaggtgaaaaaaaaaaa

SEQ ID NO: 792 - DNA, 161 bp, Mus musculus
  misc_feature (1)...(161): n = A,T,C or G
acagagctgtgagaggggttgnccacgagccaggcngagcaccaggaaactgaccttcctacttntnttnccgttnaagcnttgaangncatgaggcttatacaacattnccatacacgtgcaaatccagntcgtactttcaaaagataaaatttctggag

SEQ ID NO: 793 - DNA, 111 bp, Mus musculus
  misc_feature (1)...(111): n = A,T,C or G
cctcgctgccaagtaccaactttgtatnggnaaggacccnganggagagagtcaggattgacatgtatcgcacatggcacccnaggacctaatgatgatagatttgccgcg

SEQ ID NO: 794 - DNA, 182 bp, Mus musculus
  misc_feature (1)...(182): n = A,T,C or G
actggcgacccagatgtnggagaggatggctgnccagtagaannccacnggatnctcctttctgtaccttctcaaccngnggactcacagcttgtgtgcacaccatacccagnattttgcatngggngctggggttnganctttttttttttcatgggtgcanaagagagctctttactaga

SEQ ID NO: 795 - DNA, 251 bp, Mus musculus
  misc_feature (1)...(251): n = A,T,C or G
ccaactttttggcccaaagaagnaagggaaantngggttttccccnaccaattggggntngggttttaacctttttggggaccnatttttcctaaatttttttnccccccaananttttaacctttcttttaaancncgggggccccctttcccctaaaacctttggggnccaattgnntggtttttgggcccccagcccttcnnnaaggaagatggggncctatttttatttaaaaattcccctggaatc

SEQ ID NO: 796 - DNA, 124 bp, Mus musculus
  misc_feature (1)...(124): n = A,T,C or G
atgaatgatgataagttttgagngatcccggnaacatctactggctttcctgatctntggtctnacccttgaaccngccnagcntacccaggncngtgcnctatggncagaggacacgtcctgt

SEQ ID NO: 797 - DNA, 213 bp, Mus musculus
  misc_feature (1)...(213): n = A,T,C or G
ttttgtttttcgcttgagtttcntccctggcttcaagttggttttggtcagtgtcaacaaacgagaccatctgggataccaggcaagtgttctactcatgagtatactctcaaccattccttaaccttttaaatacaaagcacacctgtttatttaggcaccatcttgtttatggtatgatcatngacatgtattagttcaagtaaaaaaaaa

SEQ ID NO: 798 - DNA, 558 bp, Mus musculus
  misc_feature (1)...(558): n = A,T,C or G
gactgaggtggggtctttcagagatagcgcggcagtgcaagtaccttccctagaacgacccgaaggtgagccgggccggaggccgtccagcttgcgaggcaagccccttccggcggagggcgctccgcggtgtgaaaggaccgggtccgaggcggcgtgacgctggagaaccaggggagcccggatcccccgaatgctgtccagttctttgaggggagatcccgggggatgtcacgatcccctgaccctcacgggactccgagcttaaagactctcactttaactcgctcggcctcccggagacggagccgggccgagcgggtagtgctcccgggatggggtcctcccagcagaggtaacaggagccgctgtctgctccagggacgcggccgcggtgtgtttaagaccctgagaggtggaagccggtgggcgggatcgatgcgaccataatgggagagaatgacaagtcgcctcagcttcaccactcccctaaattgcttcttaggagtggnagntttcttctgataattttggatgtggatcccggttcttagcacg

SEQ ID NO: 799 - DNA, 110 bp, Mus musculus
  misc_feature (1)...(110): n = A,T,C or G
atggttctgctgcctatgtgactacttgnccccatacctacaagtacngacngtttgcggctgnangntgnnccagcanggcaggctcctagactggtaccacctgcttt

SEQ ID NO: 800 - DNA, 107 bp, Mus musculus
  misc_feature (1)...(107): n = A,T,C or G
gtggagtctttcatgaaggagtgtttctaccagccaatgcnnctnatggnatagttgtaganctantaccaagttttagatggagnaganttagatattgatttaca

SEQ ID NO: 801 - DNA, 121 bp, Mus musculus
  misc_feature (1)...(121): n = A,T,C or G
gactgaggtccaggaccncgagcanggaaggagagagttgacgtgcacannctgatctttgacctctanacgtgnaactcagtacttgcaggaggaggtgnggatgagcgcacacacacca

SEQ ID NO: 802 - DNA, 116 bp, Mus musculus
  misc_feature (1)...(116): n = A,T,C or G
gactgaggtgggttttgggctgaggtaganccctgggcaggaggccattatttncttcttggtgggaacctcttcaangggtccggaccagggaagccatgggccttgggtttccc

SEQ ID NO: 803 - DNA, 151 bp, Mus musculus
  misc_feature (1)...(151): n = A,T,C or G
tgaggcccctcgagagccagctagnggtcagccgcagccttccttcggcgcctgcgcagctgctaactgttcagtgaatactcatggaccggaagagtagatgcctctcaccactggctggnccccgagccgggagtacaggaggaaactg

SEQ ID NO: 804 - DNA, 111 bp, Mus musculus
  misc_feature (1)...(111): n = A,T,C or G
taccacaaagctacctcctggggacttaangagcttttatgttcatattnngagacagcatctgaactgggctattcctgggncgtcaccttgactatatctggaataaaa

SEQ ID NO: 805 - DNA, 272 bp, Mus musculus
  misc_feature (1)...(272): n = A,T,C or G
aatttctttccacattgtggttagantttggacccttggaaaaagggaatggatcattcttngcattntaaccaaaagggacccgggcntcggggggnccccctnttccntttttaaaaancttgcaaangccngggaaagncttggaaaaaagcccnccnnatttttttggangnggggncccaactttttgggaaacaaaanaccccttggggaaaaangtttttntttttttngnagattttttttttttggggggaattttttttttt

SEQ ID NO: 806 - DNA, 149 bp, Mus musculus
  misc_feature (1)...(149): n = A,T,C or G
tatccttagcttctctgaacagtgcttggcaccaggcacagnacagcatttgntgaagaactgaattctcatcttttngccctcatctanccccttctaacttcccacccctctctccaccttgcggtacagctagcccagataaaaca

SEQ ID NO: 807 - DNA, 349 bp, Mus musculus
  misc_feature (1)...(349): n = A,T,C or G
gactgagggatgtgaacctgttttgtanaaattgganggcttgtttgggttcttcagaattgcggcttctgatncactggangtggctgngcccctacccngnanccccctgaagtggctggcattgntgcanatgaggctgttgaacctgatcgtgttctctctggccttggacctgagtgctgcagagagagagagagagggagactctgatggctctgaagatcatggcccttcccatatgaggttctaggcagtattcctganccggtctcttgctcactccccagcccttttgaataccccttttcggtatgaatttgatgatctaatttgactatctctcaaa

SEQ ID NO: 808 - DNA, 301 bp, Mus musculus
  misc_feature (1)...(301): n = A,T,C or G
ctgccacttacagggtaagacagaagtacagccagtgagctcacctgaacagcctgcgaagtcatacacagaatangagaaagacatcaaggggctcatggctttgtgggtgctcttggcacagggaagttgcaaggtgagatttccagtggccattgcaagaaatgacatcagttcctgcctccaaacccactgttctgctcaattgcagggttggaggctggaaaactatttctccagtgaacaccatgccctgactttaacacatctgataaatatttatggaaagtttgcaaaccat

SEQ ID NO: 809 - DNA, 281 bp, Mus musculus
cgggcttaagcagctattgttgagagctcaggagggaggctgaacaacacattggcggtatttcctgggtgaaggttatcttttcctccaaacaaaggatttaaagtgagttcggaagccagatgtcttgaggatgccacctctcttttgtctgaccctcatggtttctgccacagccctctaatgacccactctaatggcgtgagcgctgcagctttctgaatttgtgacacatctttttttcatgaataatttaaatctctaagtggcaaaaaaaaaaa

SEQ ID NO: 810 - DNA, 192 bp, Mus musculus
  misc_feature (1)...(192): n = A,T,C or G
gcatatttttctgggcttacaanatgggctaaggaccactggtcctctaagagccctctagtccttcagcaccagattgggactgcagaggttcccctgcctcgtagactggaagtaaccacctgttttctgcctttcagatgtangantattccaaccttgttgtgtaaactgatttaatcagcaaataca

SEQ ID NO: 811 - DNA, 324 bp, Mus musculus
  misc_feature (1)...(324): n = A,T,C or G
gttccggggaccaaagtctgttgtncagaggggcggagcagaggcnaggcgagagcctttatctatgcagagctnacagctnaccattacgcanagccgaggcgctgatggagccagaaggaccttngttntgttctcccgaccagctncttcttgcttgctatccagacacctnaggtgaggctgggnntcaagacagagtganangaggncctttctttnagttnncagagcatctacanntgntgngcctgtgngccaagttnccccagnggtntgaganggccttgcttgngcagtgangctggactgccatcttgattt

SEQ ID NO: 812 - DNA, 139 bp, Mus musculus
gactgagaatgttatgaacagaagcagtacaaaaatggcctcaagttttgcaagatgattctttctaacccgaagtttgctgaacatggagagactttggctatgaaaggattaatactgaactgtttaaaaaaaaaaa

SEQ ID NO: 813 - DNA, 119 bp, Mus musculus
  misc_feature (1)...(119): n = A,T,C or G
tacaacattggctaaggaccnctggtcctctaagagcccatctagtccttcagcaccactattgggactgcacgaggttccccgtgcctcntagacngntaataaccaccttgtcttct

SEQ ID NO: 814 - DNA, 101 bp, Mus musculus
  misc_feature (1)...(101): n = A,T,C or G
tttttttttttttttctcngcactcttcaccccccctcgncggntggcccctaaaagcgcccacggccgcgcgccccccttttttttgggggggggggaaa

SEQ ID NO: 815 - DNA, 371 bp, Mus musculus
  misc_feature (1)...(371): n = A,T,C or G
gtagcaggaaagccctgacctgcgggagttataaatcnnccagctggcagaanancnagcttgtaattcacctcaaggtgatagtgggctcagaggcagggggtggtgcagcagctcactccctacctgtcagcagcagctacaagggaagggcctcgcctctgcctccccacagctatggactgacacgtggcacatgctgaggggcnntctccagagctgcggagagtgtgggtttcaccatgttggcaccaggcggtggcccagagcagaggagcaagcttgtcctgcaatggaggcaggtctcctggatcacctgctggattgccctgtgtgctgtggaggtgatccctgcctgccccttctcctta

SEQ ID NO: 816 - DNA, 329 bp, Mus musculus
  misc_feature (1)...(329): n = A,T,C or G
aaacacatctggtccatgacgtgaggcttgtcaagaagagacaactcctcagagccccggnctggcctgggcggaaatcagagagctgaccccattgcctgctgcacttctcacccgttctgtccctcccttccccaccagagatctgaggacaccacttgagcacttctctggggaggaagtggactcctggcccctccacgttctcatggggatgcagggtgggaggaatacccagcaaccccgggcagttgtgtacttaggagacctggcccctaacagttcccagaacattcttaagagtccttatgcctccggaaaaaaaaaaa

SEQ ID NO: 817 - DNA, 426 bp, Mus musculus
  misc_feature (1)...(426): n = A,T,C or G
gactgagatgcggaatggaatncagggatttttctacccatggagttgtgagggagatgtgtgntaccgagagagctgcgggngtcangcancaattgataaccccancctctgcctacgcctgcggtgctgntaccgncacggtgtgtgctatcatcagcggccagatgaaaatatncggaggaagcatatgtggncactgngctggacctgtggcagcctactcttcctgatcaccagtatctgtctcttctggtgggccaggcgccaagacatgctgcacctaccaaggtttctacatcggaaatgtagtaaactgtcaaagacagtctcctcactgtctaaggaccgacgatcggccaacaagtcaactaccgttctccaatccccaggaggcgaagtanaaactgcagctgcagtttccgg

SEQ ID NO: 818 - DNA, 121 bp, Mus musculus
  misc_feature (1)...(121): n = A,T,C or G
ttggaaggaccaccatgaggactacttttttggaggagcgggnaagcctctctgacanatatcatnatgctgatgttatggtacctcacanccatntcattttgaggaagcccagcgcccc

SEQ ID NO: 819 - DNA, 123 bp, Mus musculus
  misc_feature (1)...(123): n = A,T,C or G
tgctccaaaataaactatctcctatctctttnganaaaganaactaactntaacnggctnnctttngatgaccacatagtgagttgaggngtgagcccccctncttagctaaacagacctatg

SEQ ID NO: 820 - DNA, 480 bp, Mus musculus
  misc_feature (1)...(480): n = A,T,C or G
ccactgagtggagaagcttnnctcccaacacagnnnggccgggccagcgntggggcccagntaaaggatgctggacacaangtgccctcggcagctgccacccctcactctcgaacttgcctagaaccctgagcanagacatagncggatcactatccgnnaccgancggntctgtgattntgtgacagcgngacatttggantttgcctcacaaangannccannaagtctcaaagcanatgangatttaaatgtggctgtggacnatcctngatccttgaaacccnncacaattcctttaggaaggaatctancatgagagcccacagcttaaagggagtcctctaagcaagaattgctctttgagtcctacccagctggctcagagcccagcttgggaaggggtctttggacaaacctggcacccaggattggacccagcagtctgtgcttaattgggttttactccctggcaccag

SEQ ID NO: 821 - DNA, 317 bp, Mus musculus
  misc_feature (1)...(317): n = A,T,C or G
aaaggaaaaggggagggggggccggggggccttcccttggggccaaaggggccgttttttggcnttcccttggangccaagnangttccctttgncaaaaaggattgggaannaaaaggggaagggaaaaagaanaaccaaccccccggggnaggcttggnttgcttggccccaactttggccaagggggcaagtgggtttttccccancggggccttttaaccttttgccccaaaaaggggaatgaatggggngttttttttttttnaaggagggtnnatttcnaaaaatttccccttttggggcccccccatttt

SEQ ID NO: 822 - DNA, 243 bp, Mus musculus
  misc_feature (1)...(243): n = A,T,C or G
gactgaggatgtagtactctcagctgtgcctatacgcatgcctgcctgnatgacgtncatgtncctgccttgaggataatgggctgaacctccangactgncatatacactactcgcctanaatgtgagngacttcatagcnaggtgacnttgngnancggaagttnntatacagnaagagaaccctaaactgacgacaccaaaaaaaancntccaaagaaagcnccctaacttcagggggtg

SEQ ID NO: 823 - DNA, 270 bp, Mus musculus
  misc_feature (1)...(270): n = A,T,C or G
gactgagacaagactgaagactcccaggntttccgaagcttctgtgtgagatgaggcatttacgtgacttcactcaaggtgaggacttagccgtcggggctgcacaccccgatacaaatccagctgtgtgtttaagggaagcagctgtttccanatgagaaggaaaactcacttatatttctttttgaactttactcctttttaaatgttttagttgttgctggcatatattctttgtacataatcatgggctttaggggcaacatttac

SEQ ID NO: 824 - DNA, 355 bp, Mus musculus
  misc_feature (1)...(355): n = A,T,C or G
ccaggattctaaaagtgnacttgnttnctgacaatatggatccntngccncctngaancaaggatngcctggagtcctttctctaatggagaggccccnaanngnggnnctttnctagggagncttganccatcccncnccacagaaacccaagttgncttccctnannccctgtnaatctgccccctnctgcctttatttatcacccatatctaatcaganaagcangnccnggccttctttcttttatcctntcccctcctacaaccactcatagtggggaggggaaaaaaaacccacccctgatcccanttnacggggataactgntatccatctcatactctatttccttt

SEQ ID NO: 825 - DNA, 103 bp, Mus musculus
gactgagatgagtgctgtgtccaggatgatcatgaattcaagctctggagcttgagatgaactggtccgacttctagaagagaaggttccccccccccccccc

SEQ ID NO: 826 - DNA, 158 bp, Mus musculus
  misc_feature (1)...(158): n = A,T,C or G
atgaaggagtatgagccacaggacccccggcctcagactcagaaactatgtgaggaggnnntaagtgaggacngccnganagaccnnggagtgntgangnagacactgncaaccaatcgggaagtgccattgnagaggagaagctttctgggtgccag

SEQ ID NO: 827 - DNA, 426 bp, Mus musculus
  misc_feature (1)...(426): n = A,T,C or G
ctgaagactgagtgcgtctgtctgcgtgnnattacacacgantgctgnctcagcaggcatcagatcccctgtgagctccagttacagacagcgccagnctgacttggatactgggcaccanactcaggtnctctggangagcancaaatgctctccgctgtctgagctgcggagctgtctttccagcactctctggggtttccgttggaganaggcctccagntgaaaccagagctcccagattatggatntactgactggaccagggagcctnagagntcccccnttcttcctcaatgtaagggattacaggggtgcacccccacacntggntattttgacctgncagntggacccgcnncagaggggnnnnnanccctgaaccctggtcccagattgacntnggaggntactttgaggcaacac

SEQ ID NO: 828 - DNA, 320 bp, Mus musculus
  misc_feature (1)...(320): n = A,T,C or G
ctgagactgagacacagccaacaccacagactgtcctctctctccaccctcgctgatacctctgcatctaatggatggagatggttggtctagattcgtgaactgactcagngttnccatctttagactgagacagacctccanntnggctctgagctcttntggggngnnctgcanattctttgacagatccctcgcttgctactagnccaagatgtttcaggctgatttttacacatttcctgncccagacagtcctccactgagataatatttaaatataaatagatcagagcttttacaatctccaaaaaaaaaaa

SEQ ID NO: 829 - DNA, 127 bp, Mus musculus
  misc_feature (1)...(127): n = A,T,C or G
gactgaggagcatcattctgatggagccagncatagtgacaggaagcattcagctggacaacaacactgtttaagcacagcaggctggagangagaataaagatctacatcaactcaaaaaaaaaaa

SEQ ID NO: 830 - DNA, 389 bp, Mus musculus
  misc_feature (1)...(389): n = A,T,C or G
gactgaagactgagatacaggancagcagctgacatgtgcgggactgaggtgtncagttgaagacaaanccgnggngacagcatgcangttaacnnagagcagtgtctgaccagacccctcagnagctacnagncaatatcagtnccctcttttatagctcctaaatccttgctttatttattgctccctgncattgtaagagtaagaatnnnnggtnntccaaancngagctcangaatntatncaangctacatagctngaatacgactgaatcctaggcattttgttcaacatcccacattctttccactgtcagaactttctccctttctccacagaataaaacttaatggaggtgccttctctggcatgccagcaaaaaaaaaa

SEQ ID NO: 831 - DNA, 110 bp, Mus musculus
  misc_feature (1)...(110): n = A,T,C or G
gactgagggtctcatgagcctccagggtgattttgaagttctaaatctcctgctaccaagtgctgggattgcaggcantnacccataaacacanaatattaaaaagaaaa

SEQ ID NO: 832 - DNA, 175 bp, Mus musculus
  misc_feature (1)...(175): n = A,T,C or G
tgccttcattcccaggtagccnctaccccagngngctgggagcttgaacatctctgngccatgttttttagcgggccttcaaaacnggatgccctcatnnanncaccgnctcagcagtantatggcttaagcgcnagcacntaggaccctgaggtgtgnctcctgggctaaagcc

SEQ ID NO: 833 - DNA, 177 bp, Mus musculus
  misc_feature (1)...(177): n = A,T,C or G
tcaccagctcctgcccagatgtctctganctgtaatttngatnancgnccaggncacttaaggcggagagcggcgccttcatctgcgagtcaacangcctatntttgggaaaacagctctcctggaaaggaggagagnnctctggggggatncctggcgtggaagccagggtatgat

SEQ ID NO: 834 - DNA, 201 bp, Mus musculus
  misc_feature (1)...(201): n = A,T,C or G
gggcagaggcccataattacttcttgnggaactctcnanaggtctggacagggaancagcncactnananaaacctgaggnnccanacncgtggcncccttttctactnggaaccnnangattattccggcgggaaatcggggtcccccttccccctttcnttnataaactggggggtcacnaaccaataaaaattttgga

SEQ ID NO: 835 - DNA, 223 bp, Mus musculus
actgaggtagaggcgaatgagagagagagagcaagtgatcctgtggtggagcctttgcctccgtggggaagctgcacggaacagaattgaaggcatctcataggtgggctctttcttctttcctaccgcctcttgattccaattacctgaaggaacaaaagcaggcattaaaataaattataaatgatttgttaaaccattaaataaattataaaagaaaaaa

SEQ ID NO: 836 - DNA, 367 bp, Mus musculus
gactgaggcttctggttactcccgttcccccctatcccttaattttatttttctgaagaatctgcagttcaagctatcaaggtggagagagcaattacagaaagacgtgttcattgtttcagcagtgcacctatgtgacatgggtttacatattatgctgcaacaaaaacaagtacaggaaaagacttgatgctgcggcttaaatgcggatctgacttagcaacatcacacctaatatgtgtgtggtaaaaagacgtagaaacactattctcatcgaaattgaaggggtttgcatgtcttattgttaatgtaagatgaaaataaaagatgggtttatctctggtattgagattttaagaaaaaaaaa

SEQ ID NO: 837 - DNA, 178 bp, Mus musculus
  misc_feature (1)...(178): n = A,T,C or G
attttttccaggggccttggtgggcttttggaaccccaaagaaaaacttgggaaaaactttgggtgggggaaaaggggaataaccaacctttgggggcccattgggaaccccgcccccnttttctttggctttggccggccttttttggccttttggcccangcccccttggttggaa

SEQ ID NO: 838 - DNA, 197 bp, Mus musculus
  misc_feature (1)...(197): n = A,T,C or G
tgtgttttttatgctccctcctgcagcgacgnatgctaaagagacantggcgacccctctcttgcctntcaaactactganataaggggcgtcaanaaattacaggnccaggtgtggttggttgcacgcctttaatcccancactcgggaggcacgagacaggccgatttcctganttcgaggacatcctggcctac

SEQ ID NO: 839 - DNA, 101 bp, Mus musculus
  misc_feature (1)...(101): n = A,T,C or G
tccttgaggtctgggcctccctagtttggcananannnaaccgacgagccnaagttcaagagagngngcaangaaaaaagnggaccggtgctgactgaagg

SEQ ID NO: 840 - DNA, 212 bp, Mus musculus
  misc_feature (1)...(212): n = A,T,C or G
agactagggcctttgttggttatatgtctttcanagattttctttcagcctttgtgantncatcctttgncagggatnttgcagaacaaanatttttagttttgctgaagtctaattnactctancggtgttatatttatggancatancttttgatgccnngagtnagangnattncctaggngccttnccctctttataaactagggaga

SEQ ID NO: 841 - DNA, 243 bp, Mus musculus
  misc_feature (1)...(243): n = A,T,C or G
gctggctagttcatgtcctgcaggnactagnacntgcatgnnaccaggngaacggtntccagctntatgcnnnactgntnnagtggngaagacaagtaaaagagcttgttgcttaagcccaacaacctgagttccactgttggtgcctacaggagcatcaactcctcaaagttgccccctccccccccccaccccccgtattttttgggggattaaaggcatgctccaccactaaaaaaaaaa

SEQ ID NO: 842 - DNA, 130 bp, Mus musculus
atcacaggcgccccggtctgggtgctggagggaaggtttcctcagactggagcagcagactaatttttgaatctcttccccctcccctgccattcataatataaaagttttctggcttcaaaaaaaaaaa

SEQ ID NO: 843 - DNA, 119 bp, Mus musculus
  misc_feature (1)...(119): n = A,T,C or G
gacagccactaggggcaaggaaagagannnggttggacccagnctctnaaggnggncctccgtnncggnagaatagctgnttttgctcacttacctacttaagcatacttgactggttg

SEQ ID NO: 844 - DNA, 124 bp, Mus musculus
  misc_feature (1)...(124): n = A,T,C or G
aacacttaacccctcctgggaattcacaaagntagananganaaatcttggnattgatccagaggctcaaattacccgagaagtgacctctncttncaagagggactcatgccagctcctggtt

SEQ ID NO: 845 - DNA, 337 bp, Mus musculus
  misc_feature (1)...(337): n = A,T,C or G
tctaccccagttatcataccaagaggaatgcaaggnaaaacagaccatggaagacangcagaanggagaaccgcaaccaaatcnagtcccagtnatcgactganangngatngngganacncatgctgcccntctgaccagtgggagagagcaatatncggnacttgcaaacatntgtgactgcngccatttccnagcctgtnccattancctgtttagcngtntangtgcccctagctgcttctctctggtccaaggtacctgattctagtnaggagagcactgagcacactccttantggttctagtcttgaggtagctatttgacttatttatg

SEQ ID NO: 846 - DNA, 528 bp, Mus musculus
  misc_feature (1)...(528): n = A,T,C or G
ctcaaggaagttactgcaggtaacagtagcagctgcaggatcaagacngagtggaggaataggagaccatgttcttactccctggagatggagacttnaagctnactcntntgnnagancgagaatcangcacgcctcnngtgagagctnntgtgnnagacncatgtcantcaggcanaccanttccntcttcacagccaaganccttgaccaagntgtttccatcctccagtggnnncttctttccacccacctgtgaggngntgtgaantcccgatgtgtccagagctcagaccacaaccactcccacnncngtcncagnanacncgnnnaggggagcctcnntggacacaccctantggcatgacacacctgcacagcagtgtcacatnttgangccaacttttctggggtnctgggaggttccaatgactcttctagttctcttgctcagaatacgtgtgaagggacagcanggatgctctntaggggtgctcagacccactatggnccctatgtcttcttgcc

SEQ ID NO: 847 - DNA, 250 bp, Mus musculus
  misc_feature (1)...(250): n = A,T,C or G
agggaaaaggaaaagggaggcccttnncgttttactggctttggctggcttccgagnaaaatggggtggaggcttggatggccctttaagccgggaaacaaattccccatttttccaaggaggaaccancancaaacttttaaattagntccatcctttctggttaaanccgccaangggatttnttttttaattcgncctttttantattggaaagccaagaattttnnanggggtttttaacttaaaa

SEQ ID NO: 848 - DNA, 123 bp, Mus musculus
  misc_feature (1)...(123): n = A,T,C or G
acttttgtgaatttcgggagnattcagantttgatnttcactggnaccctggnagaaggaccnngacaagaatgaggtgngggtntgataaatacaccanagggatctagttaaccttcaagg

SEQ ID NO: 849 - DNA, 426 bp, Mus musculus
  misc_feature (1)...(426): n = A,T,C or G
gactgagactctcccttcgtnatgggagggggaggtgcagactcatggtctcgggatcanaacaactctgagaaaccacagagagccagatgaagaacagcgtggaaggctctgactggagttagaagccgcaacacttagaactgcaggtttgggaacggctgggcagaatccagagctgagatatccctgagcctgcagcctctgccttctctgaagatgggtancctggtctggaggggatgcctatggccctggcanggcttccatgctaggggggctgaagccaaaggctcaagatgggctcagctcagctgtgggcagttgacgaaagagttaacactggtggagggcatacacagaacccagatgtggggagcgttcggacttaatccagacctgattacattttggttttggttttgg

SEQ ID NO: 850 - DNA, 190 bp, Mus musculus
  misc_feature (1)...(190): n = A,T,C or G
gactgagatagagagggagcagattccaaagnggtctgcccccctcaagccccacgcaaccagtatcgaccctcatcttccatgtctgctcttgcgtcttgggcagaaaccggagagctagcgccactgctgctcgggtgaaatctgtatgattaaaaagcctgttacatttattacgaaataaaaaaaa

SEQ ID NO: 851 - DNA, 253 bp, Mus musculus
  misc_feature (1)...(253): n = A,T,C or G
gagtagggggtgtttngntgactagcangttaagcaagcactcgnggaccagtagggcncattactttcactttgtttggacgcncancttctncnaaagcgtacgtgaacaggganaggcatgggcttggttttcncttaccggaaagnttcccccncaaacncccccaggngtgggttttcncagggancaaccttggaaaaacttaaccattgggctggccttttggntttactttcccaaaaaaaaaaa

SEQ ID NO: 852 - DNA, 114 bp, Mus musculus
  misc_feature (1)...(114): n = A,T,C or G
tagtgtttatcttggctcnagtncannttattttngatgagatggcgtttttngctgtnttgagngggntaannttagctcccaattcttgcccctctgcttcttcttcccgcg

SEQ ID NO: 853 - DNA, 134 bp, Mus musculus
  misc_feature (1)...(134): n = A,T,C or G
gactgagtagctgagtcatggccatctacacctgctgcagctgatgacagatttcagagcataattagtttgtgagtatgngncnngtggcttgctactanntnatttttnctgctttcccagccctgctgcca

SEQ ID NO: 854 - DNA, 102 bp, Mus musculus
  misc_feature (1)...(102): n = A,T,C or G
ttgacttagggagagagagtntntctngtagcngtgcagtgagcttntgaagntnacntagtaaggtntcagggtnatgaaagagcagcgaggcaccggctc

SEQ ID NO: 855 - DNA, 329 bp, Mus musculus
  misc_feature (1)...(329): n = A,T,C or G
cccagcaccgaccgcnctcttggaggaaagagggngccttcgtttctgnttgctgcncgggacnngntnngctgatagccttagcggaactatnccnttcaagagancncacancttanatagncatnttctgtaaaccgcaaggattattttattgcccttatatganncagagttgactgttttactaaagatattttaatnctttntttacgcangaggcttacnncgaaaaaaggangggccagggagattaaanagagagaatcggcaaggcaaagagagaangagaggtgcccaggaataaagacagacacacttaagagcaa

SEQ ID NO: 856 - DNA, 162 bp, Mus musculus
  misc_feature (1)...(162): n = A,T,C or G
gactgaggttcatgtgcagaggctcagaagggacactcgtaattgaaaggtgacacagncttgncatcccaactgcaggatattactgtttatagancttangatgatgcntattgatgtncaaagcaagcccagcatctctctccttatttattatattaa

SEQ ID NO: 857 - DNA, 476 bp, Mus musculus
actgagacagggtcccacatagtctaggctggcctcaaatttgctgtgtcaaggatgaccttgagtccccgacccttctgcctctctccagttagcaattttctcagtttaacaaagtattcagtggctctcttcctgagtgacgcagtctagactcctcaaagaaaaagatccctcaaataatgatgccatatgaccatttgaatgctctttgagactcctgagatttgtacttggctctttgtggccttatcctgagtcccttggtgtttccgggcaagctggtgcagggtggggcctggagctctatgctaccataccaagtcagcctatgttgtgatttcaaaggattggtttatctcagaaaaaggatggtcatctctttgactgctaatcattttcacctgtgtaaactgctgaggggactggatttagaatgtgagatcactgaataaaatattttgattttgaaagaa

SEQ ID NO: 858 - DNA, 524 bp, Mus musculus
ctgagagatgtggatcttctcgggagagggacagagacaaggctgcagctacagaacacagaggagatgaagagaagtaaggctttcccggtgcgacaggtgcgcacagcagtccgacgcctggccttttctgatgacgtggtggatgctgggactccgattcagctggctttttgatagtcctgttgatttcataaccggaccgggagatctccgcctccagcccctggagttatttgggtatctcacttccttttgctctggttgggtcaggccaggtggaccaccatgttcaagtggcctctgtccccatcccctggctcttgtcttcactgctgagacccatctgtcagattcatcttcatcttggcaacccaagatttcccagtgcgtgtaaacacatgtacccgggtcaggtacatgcggcctgagactctgtgttcctttttagcccatggagggttggtagaaaaatttataatattctaacttgagttacacttgtgtgggggaagctatattct

SEQ ID NO: 859 - DNA, 116 bp, Mus musculus
  misc_feature (1)...(116): n = A,T,C or G
gccccttggggggcccagganggggccccnttaaatttttacctttttcttttgggnngggggnaaactttcnttccaaaaangggnttccggggnacccaggggaaaaggcccat

SEQ ID NO: 860 - DNA, 154 bp, Mus musculus
  misc_feature (1)...(154): n = A,T,C or G
gaacgactcatttttagggtaaaatgaattttcataggataattcctgagaatgtgtcttgctaacattttccgtagtggatgaactgaaaggaaaattaaatggagctttctgtatttcttataatactggcaangatttgttgaagcactca

SEQ ID NO: 861 - DNA, 109 bp, Mus musculus
  misc_feature (1)...(109): n = A,T,C or G
gactgaggatctccccaggtctntgnctttactagcttganntcgnactcacaggtcagtgtttctgcctcctgcgtgctgatantaaagacctttgacaccttgccca

SEQ ID NO: 862 - DNA, 140 bp, Mus musculus
  misc_feature (1)...(140): n = A,T,C or G
catctgctcacctaccttntnagctatcgcacttcaaggaggaaagangccgctctcaggtatttctcagaacaatgtacacagctacantgtgctgctaaaaggctcttttagcagantggaaataaacgctttggtat

SEQ ID NO: 863 - DNA, 149 bp, Mus musculus
  misc_feature (1)...(149): n = A,T,C or G
tttgaggtacctttctgcntcgttgcaggccctaccgggggcgcttacatcngagcngagtncctatcaagtnnctcagnaggtgtntgnngcnanagcaggaagacacttagatacatgtccatctgaaacccaaagaaaaggacgtt

SEQ ID NO: 864 - DNA, 496 bp, Mus musculus
  misc_feature (1)...(496): n = A,T,C or G
actgaggtggctttaccagagagccgatccagctgagcttaaagcaatatttttgaaggtcagtataaaggaatctatttgtttcttgttnggtttgtgttctataactttagaagattatttcaaacagctctttatttcattgttgaaaaatttaaaaacataccctaaagtatcttaatgtaggagtcatgaaaggtatcctttattcttttggttttaaaaaatatatggggaccatgtatgtgatttctggtgatggggatatggcttctatttgaatttctttcacgtcatgcagttcaactgaaaaggacttggaggactgaagggtgactcgttaccccttgaggactggcctctgaaggtccggagtggtagcttttctcctacgaagtttcaggatttgcaccagcatcctggaaattctctattgtgccanaaaggactgtcctcccttttaagctagaagangccccattgtttttttttttca

SEQ ID NO: 865 - DNA, 134 bp, Mus musculus
  misc_feature (1)...(134): n = A,T,C or G
aggtattggatcaagacagccaatacattgcncatgaacgnatggaaangctngagangtctnctacanggnacatgctnagcaactgagagtcttgaatncctccagtgcacaccttacacaagctaagcaca

SEQ ID NO: 866 - DNA, 244 bp, Mus musculus
  misc_feature (1)...(244): n = A,T,C or G
gggggagggccccctttttttngggttattngggaanaattttaaaaaacccgggttccnttccccnttaanggtaattngggtnattttctttgggccnctttctcccccaaacncaagggcaaaacccaaaaacctttgggaagggggaaaaagtttgggnattnggnaagnccccccacccgtttaaaggccnccgggggttggggaaccccccctttttnaaaaaagggttttttttaag

SEQ ID NO: 867 - DNA, 336 bp, Mus musculus
  misc_feature (1)...(336): n = A,T,C or G
tgagatttagctcagccagcccccctgtgtgacacatgaaaaaggtccccagatcatgcctgatggatggactatctgctaagccaaagcatcgctatcttcaggagtccaactaanaacgtttgccaatggncatcactgcctgncttgatgnctgttngaccttcctttttaggagggggcaggaangcnaatgggactctcccctgagtatccaaccatncctctnangaagcantatgcacttctgnttaanctgnatgtggcctcannanatntggaagggcctanannatntacaaggggccgnatgaggggaggagactccctctatgc

SEQ ID NO: 868 - DNA, 516 bp, Mus musculus
  misc_feature (1)...(516): n = A,T,C or G
gactgaggtccaacgatgacacaagnncacaggctccctgatcacaggtgggtgctttctggttactactccccgggaagtaagaggcagaagaaagaagatcaggcagagggagaccaaggagtagccagaaatgtgaccaagagaaagcagccaatgaaaaagtcactgtcaacacacactgagccagtagacatcaggcaggaccaagagcagagactgaagcgttgtgacccaggcctcagtgtcttaaccaagtgatgctggtcaggggacaaggtagacccttgtctcagcttgttttatgagcctcactgctgccagtggagagagactcacatcgctcatggccctagtaagtgtaagtgggttctacaggcagcaattggctgaaaagctctctctttaagggccacaccgttctgttgtaattgcaattaaatgcnagtgacccgccctcccctgagagttctgggagagggtccaataggcaaataaatattcctccgttccatg

SEQ ID NO: 869 - DNA, 172 bp, Mus musculus
actgaggtataataacctgcccaatggtcagcacggggagtggatcttggtgtttctttcacctataggattttccagtttctgctttccttgcctccctctgcagcctgccaagctggcctcgctctgcttccgggtaaataaacctttttagttcccaggaaaaaaaaaa

SEQ ID NO: 870 - DNA, 241 bp, Mus musculus
gactgaggtgaggaacctaaaacctcatgtggctcaggaggaaagaattactgggtcacgttagatgcctggaggaagaaggaccagggtcaagcccatccctgcactgccagatcctgggcccttaacctcttgtgtgttgcttcataattacacacggctttgttcctgggacgcacttctagagaaggtcacttggggtgtgcaaataaatcataatggaacaatgagaaaaaaaaaa

SEQ ID NO: 871 - DNA, 405 bp, Mus musculus
  misc_feature (1)...(405): n = A,T,C or G
agactgaggcctgcagagagagcccgttagtagagaaganatgcatggatcccctcacactgtttaagagctgaccgacagtctcttaatcggagttcagccacagccaattagccaccaatggaatttgatctcaccaatggaaacagacaaaacctacagtcagctggaagaggtgctgaggcacaagtatgaatttgaggccagtccacgctacagagaagctgactacatacaaccaacacgggactgaaatgtactcctccaagaagggggacgctctcaatacatatcaaaaccctaggcatggttattagacgcctacaaaaacagtctcggataaattttaatgctgttaagacaataaaatgttgcattctccattactactcttaaaaaaaaaaa

SEQ ID NO: 872 - DNA, 393 bp, Mus musculus
  misc_feature (1)...(393): n = A,T,C or G
agcccatcagttgggaggaagangcaaaagaagncaggagttcagtatcaccctttgaggacacaggctaaggcacangcgtgagccatacctgcttcaccttggactttctggacccatgggcnggctnagnccccanaggctggtgngagnccagcnntctgcccncaagcnggtnaccacggnctccggcgctnagnacgtgtncaactgtnaccggactgaccaggccaggnagccanaacctgancaangtcccaccaggcccgnagattttcatccttgttagacatgctcctttgatttattagctgttgctcgagntcagacaacagatgnctttcttcttgnccttcacccttnanccgnttataggagcccactctgcatcca

SEQ ID NO: 873 - DNA, 127 bp, Mus musculus
  misc_feature (1)...(127): n = A,T,C or G
gaaagaactagagccctaatgtgtgcctaagcttgcctttctgttacattcacactaccaaaaagctgtcttaaatcttaaaatcatanatataactttaaaatttcaattaaacttaaataatttt

SEQ ID NO: 874 - DNA, 119 bp, Mus musculus
  misc_feature (1)...(119): n = A,T,C or G
ctcagtgacatggaccttgcgganaccangntcngcagaggacgaagccttccanaantgntcagntgtgncnctgacttcaggngaagagcataactacacatgccatgagcaacctg

SEQ ID NO: 875 - DNA, 118 bp, Mus musculus
  misc_feature (1)...(118): n = A,T,C or G
aaaaagggggggaaaaaattttttttttttnnggggnccccccccccctncnnccccccccgggggggggggggaaaaaaaaancccccccccngttcnccccccccttttttttttt

SEQ ID NO: 876 - DNA, 286 bp, Mus musculus
  misc_feature (1)...(286): n = A,T,C or G
cacgagacacggactggnnattcgggncaccccttagctccagctcactgnggngcntganacctgaggnccatctgggnnnttntggannccanactagnctgagagaaactagantctcgggattcagngnnacancctgnntcagacacactgangcagtgagagaagctggacgcctgatactctcttttggcccccatgagcacgcacagatgtatctgcanacatccgtgcccccacacatacccgcacccacacaaataaatcaatcgttaaaacaaaa

SEQ ID NO: 877 - DNA, 186 bp, Mus musculus
gactgagggccaggattccgtccccctccatgttggacgactcacaatgacctacgactccagctttaaggaatccaacaccttctggcctccatggcacttacccactcacatacaaaagatgaaagatcaaaataaacctcagaagcaatgaatacacagtgaaattatggaaaacataaaaaa

SEQ ID NO: 878 - DNA, 151 bp, Mus musculus
  misc_feature (1)...(151): n = A,T,C or G
cacagcagccttgganaaggaacacgaggcggatcacctttttttnatttatgtaggacttnnannctcattaggganctatcgaggatcgatgcctaggganttnctcacctttcccagaggactatgnngaancagcccaaagcttttg

SEQ ID NO: 879 - DNA, 365 bp, Mus musculus
  misc_feature (1)...(365): n = A,T,C or G
gactgagttccgagcaaatgttcagggcgngctgnccaccctgcccaatccngaggactacttcctccttcgatggctccnnncccagaagctttgacctgcagaagccanaggccatgctccgaaagcntgtggcattccngaagcatanggacattgncanaancatnngctggcagcacancanaggtgatccagcagnatctggcaggcggcagatgtgnntacnacttgaacggctgncctgnctgntacgacatnntcngccctntgnatgccanaggtctgctgntntccgcctccnagcaggacctgctcaggaccaagatgagagactgtgagctgcttctgcaggagtgtgacac

SEQ ID NO: 880 - DNA, 125 bp, Mus musculus
  misc_feature (1)...(125): n = A,T,C or G
ccttgtcaggggcagantgctgggtcgtcgagagcnccncccactncttataggaacagcccaccnaattncatgaccgcaaccggaangaatacnannatcccccctttttgggggggcccttg

SEQ ID NO: 881 - DNA, 145 bp, Mus musculus
  misc_feature (1)...(145): n = A,T,C or G
gctttggagatgctgcccagacactctgngccnggacaggatactcncgnnttngtccgnatgactgagctcactgnagccactggagaacgccatgacgccntntatgtgnagggngcgctggatgagacactgccagctgaag

SEQ ID NO: 882 - DNA, 178 bp, Mus musculus
  misc_feature (1)...(178): n = A,T,C or G
ggggaagagagaagaggggggagagggangggagaagagagagnagagaagaagaagangggagagggaganggagggngaggaagnngnagangagggggaagagaaggagngaggagagnagaagagaggggagagagngaggggggaagaagagganaggagagagagagaagag

SEQ ID NO: 883 - DNA, 157 bp, Mus musculus
  misc_feature (1)...(157): n = A,T,C or G
tggcggagtttgttttttttttgggggggcctttgggcnaggtnaaaaaaanaccccntnggggggtcccagtcnnggggccccnttcaaanattnacctttttancttttgggttggggggtaaaacntttntttcnaaaaaggggtttccggggg

SEQ ID NO: 884 - DNA, 163 bp, Mus musculus
  misc_feature (1)...(163): n = A,T,C or G
ccacgggttctagcttgcggggagnnntggctgccttcccntcgcgaggcctgcncacttgatttccatcntccttcttgtgcacaaaaaaaacggagcgtcngcggantcacgcgaggcgcacatcattangtcnctgagctggagagagtcttgttccttt

SEQ ID NO: 885 - DNA, 173 bp, Mus musculus
  misc_feature (1)...(173): n = A,T,C or G
gtgctggtcagcatgactcgggggntgaagntgttaagnataccagncctgggggacntgagttccaccntgangcctnncttagtaggtgacanctgagagcctctgacttccacatgcatgcactttgnagtanggtattgcaaacacccnaccntaccagtgagagaatg

SEQ ID NO: 886 - DNA, 133 bp, Mus musculus
  misc_feature (1)...(133): n = A,T,C or G
tttccaggggcattgggccaccaaggcccaanaancctaggagcaggttacttaacatncttttcnttccccaaaagggcttggctnagttggggaaagaacttgnanctttcccagggccaaccttgggaag

SEQ ID NO: 887 - DNA, 144 bp, Mus musculus
  misc_feature (1)...(144): n = A,T,C or G
gcccgggggggggttcntttttnacgaagaatatnntnttttttgttttttttngncggncggccgcgnggagncgatccttctnttgtcncncctcttcccccgtccnccaccctttcccttctcaatatcgctcacaaaata

SEQ ID NO: 888 - DNA, 291 bp, Mus musculus
  misc_feature (1)...(291): n = A,T,C or G
ttgggggaggggaacccttgggggngggtnaaggcccangttnccgntaaantanttnccctttaanggcnaangggccaaggnngggggcccccataataaagggcttttttctttggnggcntttttcaacccnccgtttgnnaactttttaanttttccaggcccaaggggaaggccaaagntttgggcccaanggggttttggnaccccgggggaacccccttttaaaaattnacccccccaaggggancttgggggaaaaanccctttggaacttttgtggtttcc

SEQ ID NO: 889 - DNA, 157 bp, Mus musculus
  misc_feature (1)...(157): n = A,T,C or G
tttttttttttttttttagcnccttcaaccaaactgggcaagggttcaaccattgagctacncccccgaccctcccttccgntgaggctgcnncagtatcaccagnnagagtntaggagatncaacgccgntcangccgntctacccactgagccat

SEQ ID NO: 890 - DNA, 258 bp, Mus musculus
  misc_feature (1)...(258): n = A,T,C or G
gactgagagcatgctatgagaggtccatggagcnccctagtgcttnccagcncctcantggactcagtcntctgnagccctganaactcngngnaggttgacnggactanaancagcannccagnnacnactgnaggtnagaggatgcaggtggaccaggctctcagcagctctgcccctccccgccccccagcatctcctgcagaggtccctggagccatttattccagtaattataccacatacgaccctcagcag

SEQ ID NO: 891 - DNA, 123 bp, Mus musculus
gactgaggcctgtcctcccggctttctgaaaaggatcttgcaaagtccactgtgtacagaatgtgcggaaagaacacttcttgggaaggaaagaacctcctgggagatttgtcagtttaaaaa

SEQ ID NO: 892 - DNA, 169 bp, Mus musculus
  misc_feature (1)...(169): n = A,T,C or G
tccagagcggcttggcgaggccagtnatcgntgacagccagaccaanagacctgncggcccgcacaacncnganctgtccttacctagaggccanaggccgncaggnanccaaggccgcgcgccgagaaggcggtggctccggccccnagagngacttccgtcgcggcg

SEQ ID NO: 893 - DNA, 290 bp, Mus musculus
  misc_feature (1)...(290): n = A,T,C or G
ccaaggaaggcagggtaccaaggacttctttgggtncactgggnccctcnaaccccttcttagaacatcagggagtggcaaagccttacagaacacagcatccccggatgacgaacagctctttntatcatgggcctgngcnccctgggaggagaaagaatcaactnctgggaaccagcttggnccnttaagtaaaaaggactttttcccttttnataaaaacncnccttggngnggngggaaaccccnancccccnttggcccagggttgggnggaaatttttcttatt

SEQ ID NO: 894 - DNA, 144 bp, Mus musculus
  misc_feature (1)...(144): n = A,T,C or G
cccttttttccccggggttaggggttncntgggcccctttgggaacttaaggcccacccaggctttccccnggttgggntgggggnaccccttggcccctttaggaactttggaacngaagggggttggggcctttaaaaggaa

SEQ ID NO: 895 - DNA, 184 bp, Mus musculus
  misc_feature (1)...(184): n = A,T,C or G
aggggggtttcccccctttcccntnttttaaacccccccacccaaaaccnnagnnanaagggggtttggggnanagccccaaaaacccccgggggncccaaggggnaanaaaaagggggggaaaaaggccccccaaggnaagggggcccggnaaagggggccccggaaaggtaaggggggaagg

SEQ ID NO: 896 - DNA, 262 bp, Mus musculus
  misc_feature (1)...(262): n = A,T,C or G
caggcccctgggttccttggnnancctttggctttggtnccaggccgggatggnaaagganggaaaaaaacccaaaactttggccccagggggaaggggcncccaaccccccccanggggggtttttttcttttnccngaaccgggcnagnaaggggacctttttgnnaggggnaaggggcccccggttaaacccaaggcntttttttgggggggggganccccccttttttcaggngggntttttcccccggggaaaaaaa

SEQ ID NO: 897 - DNA, 154 bp, Mus musculus
  misc_feature (1)...(154): n = A,T,C or G
ggcctgcctggggccactctcntcgnntgntacngaaggangtatnctcctatctctttggcccttcagngntaccggaaaaanaaaaccgtgaaggctcgnaggctgagntgngctcctgccggntgggagagagatcctggttttgatacta

SEQ ID NO: 898 - DNA, 152 bp, Mus musculus
  misc_feature (1)...(152): n = A,T,C or G
tttttttttttttttttnctgttctgttcctgctnggggnggggangagaaaacaaacngctnttttnntttttnccagggggttntccaacnnagaggacntgaggaggccgcaacagctctgaggacccttcaggtgttaccgaaaaaat

SEQ ID NO: 899 - DNA, 532 bp, Mus musculus
actgagttccttccggttccttctgtgctgctctgcaaacctgagaagcaagatgattgtactggaaaacttccatgattttcctgttctctccctcttcctcattccacgacactgcacatccaattccactgggaagcacttgtttcaagggtgtatacccctggattcttcaggagaattagcaccataaagcagactttcatttttcacttttatactttagggctggacggatttgtagaactcatttcttggaagaagaacctaagagttcacatttttagtcttgcatttagggccttccctaattttctgaatcaaacaccagcctgacctttctcctactgttttccctcagagtaggcctatcttggcttgaatttgtagcctggttgaggcttctaagtgctgagattagaggtataagctgcaacacccagtttaccagtctgattttctaaatctctatcttttgctgggactggacacatttggtactttccatacacaaaccacccttttttttttt

SEQ ID NO: 900 - DNA, 209 bp, Mus musculus
  misc_feature (1)...(209): n = A,T,C or G
gatatgtatagcaagttattacctccagggcttgagnacaagncagnactcgggaatgactggtatacttttctgggacattgaggccagaaaaaccaagcaacaaggagttccggggtgggaacctaagcttccctctgtatctactccagggcttggcacagactttgctatgtagctgctcaataaatattcacagaactgagcca

SEQ ID NO: 901 - DNA, 194 bp, Mus musculus
  misc_feature (1)...(194): n = A,T,C or G
gtttaaaaccccgaaatatngnttcgggatcgcntgaccccaccnttgtncccntcaccccaaccgtataangttggtccaatgtgaaccntggggtgtngggaccattcggggcgttggggatacggaaaaaatttaaatgtnggtaaccgttccgagtncgaaaacggnggtaacggagtcgtgggggttgt

SEQ ID NO: 902 - DNA, 313 bp, Mus musculus
  misc_feature (1)...(313): n = A,T,C or G
agctcgctgggacaangctgccttnccgcttgtttnatatatgntngncttaccnannanngngcntnntgnntcagaaagagagtttgnaaagaaagcngcattagacactgggccagggaccacgaagagagaanagtagcancgccacccaacggacctgtgcctgctgcaaatcggacgcttaaccagcccgcccccttcgggattgggccagagcccagacatgccaaccaatcatcggccacagacngatntctttaacgcgtgaatcaaggtcacactaagcgttnganccagagaggtctgccgc

SEQ ID NO: 903 - DNA, 390 bp, Mus musculus
  misc_feature (1)...(390): n = A,T,C or G
cggagcctagcccagcanccaaaggctcagtaatanctgaggaagcacccgcatctctccctgaacatactcttacagtnagtngaaattaagaggctggcgacaccaagggggcgagctggaggagacgccaacgctttctctctagccagcccggctcgcttccggaagacgctctgtccaggggtggnccgctncgcctgctctcttncgcttccggtgtcctacagccanggccgccgccgtcgctgcagccggcgctggggagcctctgtcccccgaggaattactcccgaaagccgaggcagagaaagccgaggaggagctggaagaagacgacgacnacgagctanacgagaccctgtcggagagactctggggtctgacgga

SEQ ID NO: 904 - DNA, 489 bp, Mus musculus
  misc_feature (1)...(489): n = A,T,C or G
cagtccagcgatgctctgcccaagcacatggagaccaagcagccatganctgnttctgctgaanccatacagcanatctttgctactngactnancataactngacagttgaggttgnnctgacaaacttgggaatgacctancagctgaaaaagcagtggcatgctcccggatcggacacttagcctctgcctgaggactgaacccttctggcactgcctggggacccacaaaggatactcatgcccctgtgattcctgccagagccaaagaccggttcctgagcagcaccacaagtcctgagccctgttgagtgcccagtccctcaactcagtcccaatgagacaggactttgtattgtcctcggccacagagttgtggaagacgttgaacagccagctgtcggatggctgaaggagcagcttgaagagttctagagtggccagggcagaaaaaagaaaggaaacttgaaagagagaaaggaaagtc

SEQ ID NO: 905 - DNA, 178 bp, Mus musculus
  misc_feature (1)...(178): n = A,T,C or G
ttccctctgcgcccagaccagataggncggctgcattangccacccacggccttgtggagancccnagacagcaaacagcgtntttnganttcctgtgggcanaannctncattgtnacagngngacgtcacctncctgacctgcccnacgagggnagcgaaccccagccatgctggt

SEQ ID NO: 906 - DNA, 116 bp, Mus musculus
  misc_feature (1)...(116): n = A,T,C or G
gtgaggctgatcagtgctcctgcccggttgnnagagagatcctgnntttgatactanattgcntanttaananntgataatttggtctngcacatatttaaaataaatatatatgt

SEQ ID NO: 907 - DNA, 101 bp, Mus musculus
  misc_feature (1)...(101): n = A,T,C or G
tagacttcgtcacgtcctttgacctccacacctgnntgacancntgctcacaccagcactcgtgaatgcaaacactccaatcacgagtaaaaatcaaaaaa

SEQ ID NO: 908 - DNA, 195 bp, Mus musculus
  misc_feature (1)...(195): n = A,T,C or G
tcctattatccactgcntgcgagtcgagagaaganacgctgagctgnttngntatgncctgnngtctatnccngcagggccagctgggacangaaaggtgaggctgagagnncgcctnnccgttgagggggagnagagganccggaggannggctgactgaaggtggcccaccttgccgctctgctcaacggagg

SEQ ID NO: 909 - DNA, 155 bp, Mus musculus
gactgagggacttactggctaactcctgctcctgccgcttgtcctgtttcagctccagcagccatttcctaatgatgctatttgggggtacagatttcagagtcatacacaagccacgctcgcaggtgtgagaaatgatggcatcaatcaaccgt

SEQ ID NO: 910 - DNA, 357 bp, Mus musculus
gactgagttctgacgtcagcaccaccacctggaccctgaggaagcagctggcttcgtaggagcctctgggaatgaaccgtatgcttgaagagccgctcccgccttagccgctcagagaccagggctggaaattaccttatccgtgggcatactgggccacctctaagaggccagtctcctctaagagcggggcatcaggaagaggacgtgagtcctcagaaccatgaggtctttttccagaattgttaactagtgtgagcattttgtccatgctgaccagagaggtattgccatgtgagacaaacacaacttaactgtgagaataaacattgaagttccctcctggaaaaaaaaaaa

SEQ ID NO: 911 - DNA, 156 bp, Mus musculus
gactgaggcaggtgctatcgtgatgatctccacttccagatgagaaaatggaggcacagagagatcaaaggcttcttcaggcttcttgaatgaattaggtataagcaaaaactgaaaagatctgcagtgtccagggatggggtgggggtgggggtg

SEQ ID NO: 912 - DNA, 416 bp, Mus musculus
  misc_feature (1)...(416): n = A,T,C or G
catctattagaatgacagaaatcaagaacactgctgtcagtatgctgcccgggatgtgaggccacaggaacacacacggctgatgggaaaaataagtgatgccgnacgctgttcatatngtggctctgacactggcctgnggttggagtttcagctctggaatgattgnantgcctcacgnnncaccttctaattgccanagaancncaccatggnaaagntngaggatccttggttggcnagaggaaccacgttacttttccatgaggagtccatgtaatcttaaattcatggaataggggaggggacagacgtaaacacacatcaaattggtcagcatcgccgacctacgtaaaaaacagttctgtgtcattaattatcanaaaatacaaatcacaaccattaaagacacatga

SEQ ID NO: 913 - DNA, 104 bp, Mus musculus
  misc_feature (1)...(104): n = A,T,C or G
gagctcgggacccggggatatnatgtcctatggcgagaggtgcctantctctagaaagtataggaacttctngacctgcaggcatgcaagctgggggggttttt

SEQ ID NO: 914 - DNA, 129 bp, Mus musculus
  misc_feature (1)...(129): n = A,T,C or G
ttttagtgcaccgggcaacccctcctgcgccggggcctganaatnaagggctatnatttttnnttctcaggagnacnccggcggnangagttccaggtcactctggnanatctagagactctcaaataa

SEQ ID NO: 915 - DNA, 166 bp, Mus musculus
  misc_feature (1)...(166): n = A,T,C or G
taactgacttcctaaacactgcctgcngtctgcctcnaggagagagctggctncagcacctgaaatggccnnttagaaatttgncttgcatgggcccttggnanncttggtaaaggtctcgaatgancctgttaaagtctatggtctttgccccatgtgaaccata

SEQ ID NO: 916 - DNA, 114 bp, Mus musculus
  misc_feature (1)...(114): n = A,T,C or G
tttacaaactgacaggtnggccttnttccagggatgcnccgccggagagnactttnaggagnccgtcncatncttttnaangacccttcagctgtttcctggaaaataaaaaaa

SEQ ID NO: 917 - DNA, 214 bp, Mus musculus
  misc_feature (1)...(214): n = A,T,C or G
ttgggccttttttggttccccangnccgggntntggggaaaaggggaaggaaaaaaaacccaaaaacttnggccccaggggnangggcnccccancccccccagggggntttttctttccccggaccggggangnaagggaacttttgganggggnggggccccgtnaaccaaggnttttttgggaggggaccccctttttcaaggggggttta

SEQ ID NO: 918 - DNA, 350 bp, Mus musculus
  misc_feature (1)...(350): n = A,T,C or G
tggccgtcctctgaggccctaccagnacctgactgagatagntgcacttacactcacccactggactgaaactgggnaccnntctgaggaattaagggaaggactganngacctgnaccnggagttatttacatnatnanaccagcanncttgttctntctgnntctcggttgnnggaggcagacnatgtttcntctacctgacgtctgcacnnactgggctanatgaaatcncncctcaaaacagtctatctnatncntggcccactgacttccncatagttgtcctctgacttccacatgtgcccccacccaacctatanatangtaaataaataaatgtagtgagaa

SEQ ID NO: 919 - DNA, 133 bp, Mus musculus
  misc_feature (1)...(133): n = A,T,C or G
gacataaccggctttgggaagctttctaactatccaggagccgctgaagcggccaggnatcccggnctgcctgnttgcatnctncagagggaggtanttnncctgatnacaaggctcgcagaaaataaactgc

SEQ ID NO: 920 - DNA, 249 bp, Mus musculus
tgagataaagctgcccagaggagccttgattatctccactggagtcacctttggacaagcccctgcactggtctttcttgaagatcaccaagcaacatgtctcaacactcagccatggttgaaacgtgcttgtatcttgataccagaaatatccatggcctggcttccttcgtttccaaacatttccattttcaggctctgtcttcgggagcatttcaaaaccgagaagcagctgtaaacaaaacaaaa

SEQ ID NO: 921 - DNA, 120 bp, Mus musculus
  misc_feature (1)...(120): n = A,T,C or G
tcttaaaatgagttcgccgctctgggncttgggggcggctgacacaggaagctcagnttctttttngagcgcgcctaattttcatcagncnganggtgctattctgcagattgacttgcc

SEQ ID NO: 922 - DNA, 132 bp, Mus musculus
  misc_feature (1)...(132): n = A,T,C or G
gaccccggcccgggcctgcnggatcnagggtggagcttcctgcttttcaatctgcccgcagnctgcactaaanggaggggcctcancctttncacctttntcctggacccaagataattcggcggaaatggg

SEQ ID NO: 923 - DNA, 253 bp, Mus musculus
gagtccaggaggggacctggtcacaaaagctgaatcaaggaccctgaaaccaggtgacctggataaagcccaacccccttttgtgaaaatatgattggtcaatgcaacagaccaccctgctccccctccctttttgttcccatcctataaaaatgttacactgtctgtctcccctggggatgcagtacagatcccaaacgggttgcctccctgagcactcagaaaataaaactttactttttaaaaaaaaaaa

SEQ ID NO: 924 - DNA, 145 bp, Mus musculus
  misc_feature (1)...(145): n = A,T,C or G
agaggccataattacttgcttgtggaactctcngaggncaggacaggaagnatggctgnctccatactgagatgaaanaagaatctgntgancganancaccngcttatgcggccctancctctnngancggcgacaagagtgat

SEQ ID NO: 925 - DNA, 381 bp, Mus musculus
  misc_feature (1)...(381): n = A,T,C or G
gactgaggtctgggacctgtcctatgggggacatgaagacccctgatttcgatgacctncttgctgcttttgacatccctgacattgatgcaaatgaagccattcactctgggccagaagaaaatgagggaccaggaggccaagggaagccagaacccagtgtaggaggagattctaaagacagagaagaagcagcagccgctgagaatgaccctgagagtccagctgaggcctctgatcatggccttccacaaccaccggatacttctacagtcagcgtcattgtcaagaacacagtgtgtccagagcagtccgagagcctgactggggattcaggagaggaagagaccaaggctgggggtataactaaggaaggacctg

SEQ ID NO: 926 - DNA, 404 bp, Mus musculus
  misc_feature (1)...(404): n = A,T,C or G
caccagagtccctgtatcagngggcgggtccgcttntctaanngaggaangttaccctctccctgctcagaccctgacaatggnctcagtccgtagcatccaaaggaccacagctctgaagaaaagaagatctgctaagcacagcatcccttcctgaatgttcccaagcccatgtccaaggcatctcttcagccacaaagtgcgagccgccatgaacgaggggcttgctgcggctcagatgtggatattctttgttcaaaatcaaacctttcacacggtccccatttcatggctgtacaatttctggctgcggngctgnctctaatcaaacaccgttccaggaggtccacaaggaggnatccttgcctgncttgagatgancaccttggcttgctgggagcata

SEQ ID NO: 927 - DNA, 333 bp, Mus musculus
  misc_feature (1)...(333): n = A,T,C or G
gactgagatccctgatttatgctgaccaactgactcacatgtgcacctcaccaacttcaacgttacagctggcaataatggaaaagagcantcatgtggttgtagctttgacccacatatcaaccttgggacttanagaagttgaaacactaataaatataacctccatgtggccagccaatntaatnctggtcacaaaatgaggctnnnatnntggcngnactctnanacagtgggnntgctaggctgntagtatacactcncatgacaggaagacaacatgttctaaggacaaagntaatgaatggacaatcgnnacccagcatcattaag

SEQ ID NO: 928 - DNA, 102 bp, Mus musculus
  misc_feature (1)...(102): n = A,T,C or G
cagtacgcagaggcactagagnctggactgtcatgaagggaagctacagctcattactactaaaaagcacaccatgggtggaaagttaagatgcgaaggaaa

SEQ ID NO: 929 - DNA, 408 bp, Mus musculus
  misc_feature (1)...(408): n = A,T,C or G
aacagacagtagtggcncagantgactggactnccangngttgtctacggtncagnatgaanttgancgcagttgagnaganagaanngtgagaaaacggnactgggctcatttccctgctgaaganagntcttgancacantgagttgacngnnagacttgatccgagggancctggntggaggctggnancacancctgntnctggagtttaaggcaagatancaaaagctacncgaaacgcccaggagctggctggatatccctggaacattntgctttttacatcaaggatgcnctgaagggctagatgcagcggaagggcccagctggaggggancaaagcatcaaggggnttgttctnctaatccacggncaggaattgttggccaaatatgaaagtgagac

SEQ ID NO: 930 - DNA, 164 bp, Mus musculus
gactgagctctttatcttttctcggtgagggaatcacaacccaacccaggcagctgcccaccagcacccattctttccacatggcctcaagaagcactgctggaacctggaaccgactctgaatgagaaggaagaagagatgtgacccatttaaagaaaaaaaa

SEQ ID NO: 931 - DNA, 181 bp, Mus musculus
  misc_feature (1)...(181): n = A,T,C or G
acagaagtaccaggtcttccctcnccagccaccgcncctngggcnantgcananggaaaatctnccnttaccnacacgtggcctaagagaaaccagtacgngggcnattccggagaggccnggaatagggagngatgganngagaaggttccaggnatggccnttactcacgagcaggccc

SEQ ID NO: 932 - DNA, 104 bp, Mus musculus
  misc_feature (1)...(104): n = A,T,C or G
gactgaggagttttagaaatgctaaccgagctcaggttttgaacatgtctgggactgtgaattggctgccagaatgaaccnnnggcaagcacagagctgataga

SEQ ID NO: 933 - DNA, 514 bp, Mus musculus
  misc_feature (1)...(514): n = A,T,C or G
gactgagagtggcccgagttcgtgaggactatgccccgtggtgggccacgcacacgctggactggctcaagtttggcaagacngaanntgntggnntngttagtggncctgaagcaggacttgtttacagcagctggnccgcatggtcagcctgctgggctgtggcaggtcagggaggatcggctgctgtgcgtggagagccagaaggacggcaacttcaagcgctcggggctgcgcaagctggagtatgacccttacacagccgagatgcgcaggaccattgccgcctacatccgaatggtggacacggcactacgtagccgcaacctcactggggtgcctgatgcctatggcccaagatgatgggcagccagggagggacccagcatccggtgccccttggcttcaaagagctggcttccctctggcacaaagacagccccaggcttctgcctgccttcagaaaggcccctctgaggcctcaggaggaggagatatctagacacctttccct

SEQ ID NO: 934 - DNA, 247 bp, Mus musculus
cacttcagagagctctgcacgcggcacgccgggtggacgctgaggattccccagtgttcagaatccaaactcccgcggcgtcctggtaacgataacaactaaccacgtgacgatctaagcggaaatggacgctctaggacacacctacttaaaatgaacttcacctcagccacttttctggcggaaatcggtattgcccatataccctatcgcttgcaagcactaaagttgtgttgcgcatgcctac

SEQ ID NO: 935 - DNA, 365 bp, Mus musculus
  misc_feature (1)...(365): n = A,T,C or G
gccccagtgtaaggctcgaggagntgagctttgctcctgncggtgaggganaaagatgctngtttctggatcctacaaggcattctgnnnttgantntncagctctagnacnananntaccataangactgnctcacagagccacntctgttatagaagacataggagctctcagagttctaatcgtatcatgtgtgaaagagctggagagctgagtgcaaggccagtctggtgtatagagtgattctaggacagcaaagactgcatggtgaaaagttatttaaatatacataatttaaataacttaaggaatttctttttttcttcttcttttctaagcctcttaaggaatttcttaactaatg

SEQ ID NO: 936 - DNA, 227 bp, Mus musculus
  misc_feature (1)...(227): n = A,T,C or G
gactgagcgaacacgttgcttttgantggaggtcacccaagcaaaagcncaagtactgacagtcttcaaagaacaatgccggtggggatccttgcagcccaggtntctccaaggctgnactgagcanaagctgangttncagaaggcagctcangctgaanggtgaaatcaagtcctggctactactccttcngccatctttanagtcnggtaggcccacatgtgga

SEQ ID NO: 937 - DNA, 101 bp, Mus musculus
  misc_feature (1)...(101): n = A,T,C or G
ctgatgccctcttctggtgggtcttcagaggacagngtactcaaatacatgaaataatttttttttaaagacaactacagngnactcatatacatataata

SEQ ID NO: 938 - DNA, 226 bp, Mus musculus
gactgagcctagtggcgacccctccaggccgggccaggcgcagcactcgaggcaagcgcggcaagctcctgcgctctccaaaggatcccgtgcccctcggggctgccgggtagggtaatgccctcagtaatggagaagcccagtgcgggctccgggatcttgtcccgaagtcgggccaagacggcacccaacggcggacagccacactcggaggatgacagaaatc

SEQ ID NO: 939 - DNA, 453 bp, Mus musculus
cagactgaggacagacacttcaggtcagtttggagactcttcttccaattgtcactgaaatggcacaagccacatcaatagaggatttttacctttagtgacaattttcttctctagttctggagatggaaccccaggacaatggccaggctccatctggtcactagccaggaagaaaggcagcctttggcccctggggacagtggcttcacaaagcatagagagaaaccttgcaaaggtgacatcctctgcggatggcattttccataagatgcttaggctgctggaaggggaccaaactgcatttaaaataggagaggaatattcctgcagaaatctacaaggacaggcagggggccaggaggagtgacatcatcctgtcggggaacaaatgcaaagcatgtgtagagctctcacctttaaggatgagtaagcatgaaaaaatacatatgt

SEQ ID NO: 940 - DNA, 243 bp, Mus musculus
  misc_feature (1)...(243): n = A,T,C or G
acgatattggagctgagaaggacaccttgggtcctggcacggactattctgagganaggannaaagacacttnnangctgtcatatntgcatntttcccctcacanagganagatgtaacggtgagctttgnagcatgaatcataactttnattgcttgccagtcacctggggaggcaatgttgcttagtgggctccatttccagggccataataataaaaactacacggaataaaataaaaa

SEQ ID NO: 941 - DNA, 508 bp, Mus musculus
  misc_feature (1)...(508): n = A,T,C or G
tgagtgtttcccatggagcctagaaacttactcatggaccaggcaacgaggctggctgctcaggaggaccctgggatcctctggcttgtgcctctcctccacaagatgaaaacgtgtacttcccgcagtgagaaatcaccccacccactcaggaaagcaaggagtccattctttcagctctttactgaggctctcacaactgcctgtgcctgctactcaaagggtctctcgatgtagtcctggctgttctggaattcactatgtagaccaagctgaacttcaactcatagaaatccacctgcctccaccccaagagtgctggggctaaaggaacgcacttcactctgaacaatttaaacagagaaggagactataaatctggccacttaggcagatgggaggtttacacagcaaagacactgcatactgcatacaactgagcagttgttaccaggaccgncttgcctacctggcagaatcatgctcttcctgacaagcccacagaaga

SEQ ID NO: 942 - DNA, 214 bp, Mus musculus
atttaactttttaaaaagcacaattcggcaaccccgtgagaaatccaagagctgggcaaatattctttctgagaagctctgagaaacctgagcatgggattcctccatgaacgtttgcaaatagaatgttacctttaattcatccttgcgtcctttgaataactgttttgttgtttcaataaaggtcagaaagcttattgcacagaaaaaaaaa

SEQ ID NO: 943 - DNA, 180 bp, Mus musculus
  misc_feature (1)...(180): n = A,T,C or G
ccccaagggtttctccngacngagagngacttgaggaggccnttacagctctgaggacccttcannagctaccggaaaaataaaaccgngaaggctcggaggcttgagccactgctncttgccgggangngagagagatcctggtttttgatactaacaaagcntattttttttttgata

SEQ ID NO: 944 - DNA, 279 bp, Mus musculus
tgaggttttcttgtaagcacttcgcagtgactattcttcagctctatcagtctttcatcggagtgagttgtgttccagagcttcaatgggctgtcagaacctgtaggagagaagatagcatgacaacagattatgtgtgagtgtattttgcacacagggactgtattttcacagtcaaccactcatatgttgagaagtaagcactctatacctgtagtaaagaacacagtgttaaattctgcaaataaaacaaatgagtccttgcgtgaaaaaaaaaaa

SEQ ID NO: 945 - DNA, 502 bp, Mus musculus
  misc_feature (1)...(502): n = A,T,C or G
gactgagatgacatccatgtttgaagctttccacactccttcnagtctccaagagccttgtgagaagagcaggaggggaatacanaagtagggagaacacagtctcaagcttggtcagantcgactcttcctgtgttgcagaaaccggttcttctaggagcgttgcagactganaggaagctgccctgccaggggacagctgtcacctggacttgntcaacaccattagaaatgaattacatcagcactcaggctgttcaacggaaggttttagaggctttccttaactaaaagacgtaggtgaagagatgggcttgctagttagcctgatgtaacactttcaaattattacaaatgcatatgaaaatatcatattacaactcacatttaagactaaactttaaaaacctactattattattgnagagtgtgggcacctgtgtgccagggcatgaacatggttgtcatgggataaaatgttaaattatttaaaaaaataaaa

SEQ ID NO: 946 - DNA, 117 bp, Mus musculus
  misc_feature (1)...(117): n = A,T,C or G
agaaaaaaactgacangaggcccanccaagggtttntngngacggagaggactngaggangccgnaacagctctgaggacccttcantgttaccggaaaaataacaaccgtccaagg

SEQ ID NO: 947 - DNA, 105 bp, Mus musculus
  misc_feature (1)...(105): n = A,T,C or G
caaaggctgggatcacggnnggctcccgataanaggatcttgccttcccccangcttanncagggctctnggnccagnctcctgccctgtgatgatctcgggccc

SEQ ID NO: 948 - DNA, 154 bp, Mus musculus
  misc_feature (1)...(154): n = A,T,C or G
gcacctgtcggtcgccanaatgagaattcnaatgagctgcttgaacatggntgtagnancagggnnggaaattccaanaancagatctgggatcccatngtgtnatttattcggagagagaagcncagagtacctacgagccctttttgtctac

SEQ ID NO: 949 - DNA, 148 bp, Mus musculus
  misc_feature (1)...(148): n = A,T,C or G
atggaggaccattggactggcnctgtnaaactgnaancgagantgtnattaaggcgcnagncattgctattgccgnangngagagagatcctggttttgatactagaaagcatagtaaaattgataatttggtctagcaaaaaaaaaa

SEQ ID NO: 950 - DNA, 121 bp, Mus musculus
  misc_feature (1)...(121): n = A,T,C or G
gggaaccgggacacactgnaacgcagggtgctntntaacaagaacttggtgagtncatgcntanctatacnncagctggccggngacaatntntagtacaagaaacacccctgtagaatga

SEQ ID NO: 951 - DNA, 153 bp, Mus musculus
  misc_feature (1)...(153): n = A,T,C or G
tttttttttttttttttgagggattgttttaaacntnacnctggggggggcaggctcacnnnagaatctggnntttganggggggganacaaagcccaaaccctttnttntttttttttcagnngaaagcttnaaaatttgagggggcggggg

SEQ ID NO: 952 - DNA, 203 bp, Mus musculus
  misc_feature (1)...(203): n = A,T,C or G
gactgtgccgcactgggaatggtggcactttgtctgtgatcctagcaccctggaggcagagcagagatcagccagttctagaccagccagaattacatgggtgagaccttttgaggagaaggattaaggggatggagaagaagtgttgctaaatcttccccagagtaatcaaattggagaggngacaaccaaaggacatttct

SEQ ID NO: 953 - DNA, 130 bp, Mus musculus
  misc_feature (1)...(130): n = A,T,C or G
tgcaagccggcctgtganagcgaacataanaccatggcttgnttagaagagacctgnncggccagctgcgcttgngngganangatgaacatgnatantnctccattttactaacccggctacattgcga

SEQ ID NO: 954 - DNA, 112 bp, Mus musculus
  misc_feature (1)...(112): n = A,T,C or G
tcccgggcgggacctgtttnngaagggctatnnccctanattatnaggaggacaaggctggnnaggagttccaggtcactctgngaaatctagagactctcaaaaaaaaaaa

SEQ ID NO: 955 - DNA, 125 bp, Mus musculus
  misc_feature (1)...(125): n = A,T,C or G
ttccaaggttaaaggttcttcccttggcccttcaaggcttatttccccaaggttanccctgggggggaactgggcaggtttttttaaaaaggttnnccttggccctccaaagtttttccaaaccc

SEQ ID NO: 956 - DNA, 116 bp, Mus musculus
  misc_feature (1)...(116): n = A,T,C or G
cggccctaaaccctctctccggngagncganagcccaancangtcccccgccnttttttcagccangggttctccttgccactcnanccctgnccaccaacaaacaaactcccaca

SEQ ID NO: 957 - DNA, 125 bp, Mus musculus
  misc_feature (1)...(125): n = A,T,C or G
tttttttttttacgcgnctccggtcttttnatncttganaggctgggangtaanaaacactcgcncgcganacnacnaccacggcgnctcacctcctgaagctccgcccctctcattttttttat

SEQ ID NO: 958 - DNA, 176 bp, Mus musculus
  misc_feature (1)...(176): n = A,T,C or G
ttggggggaaatttaaactttngggggtttttaaaactnaggggggnaaccaaaccnaaaccttttcctttccccccaaaacnaattttaaccaaggcccaaaaccccaaacgggttggggggcccnnttttncnntttgggctttgggggaaaccatttgggggggtttgggaag

SEQ ID NO: 959 - DNA, 348 bp, Mus musculus
  misc_feature (1)...(348): n = A,T,C or G
agttctccagtccccagaacaccccggacatgaacctgcatatattcaggacatacaaacagcacatgtggctgaacagctttgccaagagtcctaatgagaagcagatcgctcagatccaagcacagaactgagcccctcatggacacccaagacatgtgcatggggtgggcagatgtcctgtgctctgcactggctgcacaacacagagtctcccatggaaagctgagaccaaggtctggtggagaaacatctgcttcaggctagcagctgtactctggagcgncttcttcagaatgtnaacatataatttacaaaagttaaaaacaggactgtcaaaaaaaaaaa

SEQ ID NO: 960 - DNA, 112 bp, Mus musculus
  misc_feature (1)...(112): n = A,T,C or G
tcttgagttttcctcttctctctctgggaaggagggaaaacagncctttgtgagaagcgtgctttcctggaatcaggcgtttaaactcaggttggctagagtttttgttttg

SEQ ID NO: 961 - DNA, 107 bp, Mus musculus
  misc_feature (1)...(107): n = A,T,C or G
ctgcgcctgtcctctgaaggtgaagggctataaccacagcttctnangaggacaangcgggagganntccaggacactctggtaaanntagagactctcaaaataaa

SEQ ID NO: 962 - DNA, 307 bp, Mus musculus
  misc_feature (1)...(307): n = A,T,C or G
ggatcgtgtatgcatgtnaatgctnaggangacatctacatcttgcanaagggtgangcaactatgggaagtggatactcacatacccagncntcangactgctnagactcacaacagnactgntacttnacacagaccactanagcagctaaactgnngnctnaaagnaagggnactnggtcgtnantctggtgatgcgcctatacacccttcgagaacatatgtgngagtgcgtgtgtgcgcgcacatacacataatcactccacacggacatataaacatttgtacatattttaaaaaaaaaaa

SEQ ID NO: 963 - DNA, 307 bp, Mus musculus
  misc_feature (1)...(307): n = A,T,C or G
ttatgatacagcatacacanccatgagcccaggtgaccgncgcnagaagggtgtagcaggtcctcctgcaangagccctttnaggacnctcnccntgnctncgggnacctcnctgagaanctnagcgtanncncaacacgtgntctccctaggataggccnccacattgccttcccantanntnttatgaganctacnagngcgtngaattattacccatacaccatngcagactcacttggctcattattgaagtttnaaattatatctagnctatgatgctgtgggttaacgcgcaaacttattc

SEQ ID NO: 964 - DNA, 147 bp, Mus musculus
gactgagactcctcatctgcaacgatctacattatccacagcacgtttctacagacatccctctatgccagaccctcagaataaatggaacctctctgcatgccaatttatttaataataaataagaaagatctgcaaaaaaaaaaa

SEQ ID NO: 965 - DNA, 264 bp, Mus musculus
  misc_feature (1)...(264): n = A,T,C or G
tatgggggagaatttgattaactgccgaggagtggacatgcaggggatccgaggcangctgcgaagtctatcacacagctaaagctccgttacgtcttcatgtcacctgcttctctatctccagatagctggtggacgggcagctgcaaacctcacctcaggggcaggagaggctccacgtgttccaagaataactgagtgtttgngcatctgggatatctacattataatagcccatcaataaagattttaaaccaaaaaaaa

SEQ ID NO: 966 - DNA, 170 bp, Mus musculus
ccagttatccttgttgaggaccaaatcagagtttctacgaagttgcctatggctgctggagacaggggatcctgttagagagtaaggagcccctggcaaaagcattctgccttttgccttcatgaatgacttcttggacctcatgttgataacctgtctaaaaaaaaaaa

SEQ ID NO: 967 - DNA, 108 bp, Mus musculus
  misc_feature (1)...(108): n = A,T,C or G
gactcaattttagactgctggaggcggcagccacagcgactgagatntgttganatgtgcctaaggnnagagtnnnttntcaattggggcttcaaaaaacaagcatca

SEQ ID NO: 968 - DNA, 120 bp, Mus musculus
cacagattgcagtcttcctcctgcgtgctgagtgcttgggtcacgggtacgcaccaacacacctggcttcgcttttcatttaccgcttctacatatatttgaagttcacatggaaaaaaa

SEQ ID NO: 969 - DNA, 331 bp, Mus musculus
tgaggcctcagacaagacagcgaagtaactccaaatatatagacaaggagatagcaaaccttaagaaggatcttatgcgaagccgaacattctccaagagagagggggaagagcaatgaacagcttatagtccactgttcccagcggaagcacgcatgctgtcgcagtactaacatgcacccctccaggttcccagtgtctcctcgccctctcccgtccatgacctggagaaagttccaatcccgaaacccccatgtgactttgtttgtaacaagggccactagatgggtaactgagggtcaatgaagtcaaatgtccttaaaaaaaaaaa

SEQ ID NO: 970 - DNA, 152 bp, Mus musculus
  misc_feature (1)...(152): n = A,T,C or G
atttttgggaactcancctgactgacctgcttggcagcgatgaacagaaaacaanctggaggaggcccaccccanggtttctccgacngagaggacttttnngaggnccgtnacagctgtgaggacccttcanngttaccaggaaaaataaa

SEQ ID NO: 971 - DNA, 398 bp, Mus musculus
  misc_feature (1)...(398): n = A,T,C or G
gactgaggtcctaccccaccngaggcanggccggtgtgtgcatnccatcaaagctccanagntganggcagggagancatcctgngctactcangaccctgcatcanaacaaaacaaggacaatgaaagaccactactggngtctcctgagacctcactctgcgatgtgggtcanatggaggtggcgtctgnctctcagacagtggcacaaaaggctcctttgtgcgctagncaatggcgtgggcaggaccagcctaagacggtccttgcttaggagaaagccaaagccaacctccatgtgttcctcaganggtgttggcaccaggaatcccagtcagacctggctgaggtcatcatcacctctgtttgtaacacagaaaacaactccgcagatggca

SEQ ID NO: 972 - DNA, 230 bp, Mus musculus
gactgaggttactgtagactgctagtcccggctatcagctaatgcgggggacctggattcagacactgtgcctgatgaatccgttttgagaaaagaactccacgtggttcgtgggcactctcaccttccagcaaatgataagggttcctgtcatgtttgcctcaagacttctccatgtcgtatgaactaaaagggaactgtggcttttgatgggcatttagagagagatg

SEQ ID NO: 973 - DNA, 288 bp, Mus musculus
  misc_feature (1)...(288): n = A,T,C or G
ccacccaaagggttcttcacttgnaaaccaagnaagnangnagggnaggganagttccccttcattaaagcccagnacaaaccaaggagcctggtggtggatggattaccttccccaggtaagttggaaaaaggggaaaattttcttttccaggccggccttttccacttgggnaaaaaggctttggccccggggggtgccaaatgggaaanatttaaagtcccccgnttttgggcccccaaaatcaaactnttgggagggggggncttggnaacttggccgggttta

SEQ ID NO: 974 - DNA, 124 bp, Mus musculus
  misc_feature (1)...(124): n = A,T,C or G
gactgaggttcttttcgctccccccaggnccttctgaacagcttcaatatcaaaaaaccacaagctactgtttcctaaaaacaaagcctgctaagtctcactgtgatatttaaaaacaaaacaa

SEQ ID NO: 975 - DNA, 157 bp, Mus musculus
  misc_feature (1)...(157): n = A,T,C or G
tgcacaacctggggctgnagagatgtgctcagtgantaacagcactgactgcnctttcaaaggtcatgagttcaatccccagaaaccatatggtggcccacaaccatntgtaatgttgatntagatgccctcttctngtnttgtctgaagacagctt

SEQ ID NO: 976 - DNA, 117 bp, Mus musculus
  misc_feature (1)...(117): n = A,T,C or G
tgctggagagcttctgatgcangcagcgtcttataactnnncgagctnaatatacacngctctcactggcgctggagangacntcatctttctgacaacaccttgtgtgcttctaga

SEQ ID NO: 977 - DNA, 122 bp, Mus musculus
  misc_feature (1)...(122): n = A,T,C or G
tgcttgacagcggtgaggagnaaacaccnctgccaggaggccnacccnangatttctncgacggtcnaggacttgtggaggccgtatcagcttatgaggacccttaagatgttctcggaaaa

SEQ ID NO: 978 - DNA, 514 bp, Mus musculus
gtctggggagctcctgcattaagtcagactgagactcgaacttgaacttcaccagagaaccacatccagggtcattctgcacggaccgactggctgtgcgctccgttgccatccctcagctccagggccagagctgctgacagaggagacactggtccccggctctgcctcccactccagggacatgctcggtgcctctcatcttccatggcgtttaccacgggaaatactgaacacatacacaagagcagagtctcattgtgcagccctagtcagactgaaatctgagatctgcccacctctgtcgcagttgttgccaggatggcaggcctgtgtcattgtcaacatggttttgatattgctgtttgctgtaagaggctttaaaaagttaacaatggaagtaagcctccacctccctccatcttacccgccatcctccgaagactctgccgccctaggcctaaactcacaaccttcctacctcagcgtacgggtggaatgctaggatttcagg

SEQ ID NO: 979 - DNA, 401 bp, Mus musculus
  misc_feature (1)...(401): n = A,T,C or G
gacgtctggggagctcctgcattaagtcagactgaggtngacagcncctatcgngctgnataggattccagatgctanncangtacnacacannacanntccctgnatgagcttntcatcccancnggaggggaagttgtgagcangatcctgagttcnaggctagcctgngccactgtctcaaagacaacananaaacncaaggntgagatatcagctgagttggnagaacgtttgccttgctcacgtgaagcattgtggaaggaggatcagaagttcagggtcatctttgggctatatagtagnattgnaaactaggaaactagtctgntctacatgagttgctcaataaaacancatatctacccttgttgcgtgtcttagggtttcaaaaaaaaaaa

SEQ ID NO: 980 - DNA, 496 bp, Mus musculus
  misc_feature (1)...(496): n = A,T,C or G
gaactgaggttttatgacggcagcatgagaggaaattattcgaccacctcaaatcgcctcatctgaagtactgggttcccttcatttggtttggaaatcttgcaaccaaagcccggaatgaaggcagaatcagagacagcgttgatctacaatcactgatgactgtaagtgtccatggacacgagaaaagggtgctagccagggctcaagagggtgccggctgtaacaggacagaccaaaaagtcttctctgttctccaaggagccaggaagccatcatgaaaccccagagtgtgcagggcatgaaggcgcaggactccctcaggctccttggaagtatttgctgtctgcacagcacgctcttccagaggctgatgggaaaagtgttaagtcagcattgccaaagactccgaagagacacgttgcccacgggcatttgctagcccttgcttatgaattctagaatanaaatcctctttttctttctttaaaaaaaa

SEQ ID NO: 981 - DNA, 101 bp, Mus musculus
  misc_feature (1)...(101): n = A,T,C or G
gtagccaaaacccggagnnacccacaganagatngcaagagagacggtcnngacaaggaaggcccncgcangcgnccacccncctgaggcggcaggccaac

SEQ ID NO: 982 - DNA, 141 bp, Mus musculus
  misc_feature (1)...(141): n = A,T,C or G
cctgagttagggggagctaaagtagtaaaaaaaaagnttgagctcgagtcctcnncactctgntcactggctcctcgtcactntgccatggcatnnggnaggtccagncctngtnactctgctcactgggaaaaaaaaaaa

SEQ ID NO: 983 - DNA, 278 bp, Mus musculus
gacgtctggggagctcctgcattaagtcagactgaggatttctgcctgtgttaggtttgatgttccgtattgaattctccgtctctcatgtgagcctgtcatcgttcatatttggcaatatttgaacatcagtggtatccgccttgaacttccgttatttctccgaagcagaacaccgagataattccttcttgaatacaaaggtatcagaaatatgttcatagcattgccaaatgaggtcggtatattaaagaagttacactggaaacataaaaaaa

SEQ ID NO: 984 - DNA, 103 bp, Mus musculus
  misc_feature (1)...(103): n = A,T,C or G
ggaaactggaaaagctgctcgnagtngtgaacgctcggcanttcctgtgcaaacaggagatggtagggcnaagcaggcancctttatgatacgttgttgagga

SEQ ID NO: 985 - DNA, 390 bp, Mus musculus
  misc_feature (1)...(390): n = A,T,C or G
ggcccacccaaacccaaacccaggnaaggccaattttaaggccgggccgggggggcccccctttttaaggtttaaaaaagggnagggaaaaaagggaaggnaaaattttcctttccggnaaaggaaaattttaccttaccccggaaaaagggatggccaattttaccaggaaaaggaaggttagaaggaaaacctgggaatttttttggaggaaatanccctttttcntttcgcttttaaagggttnaaaatanccctttggaaaaagggaaaactttgggannngaaatttgggaancccccctcggtttaacccaaggggatttttttttttnnttgggcanttnggaaaaaaaagnccnggnnttttttttggggggttcccccccc

SEQ ID NO: 986 - DNA, 119 bp, Mus musculus
  misc_feature (1)...(119): n = A,T,C or G
ctgattttgtgagtagaaatcgagancctgccatcnnccccactggnngttaccatnncaacagctacttgcagctggagaggatnantgtntactactatgaagctgctgctaaggga

SEQ ID NO: 987 - DNA, 328 bp, Mus musculus
  misc_feature (1)...(328): n = A,T,C or G
gactgagatgacagggatggcctgcgggcgaggacagccaggaccgaaccgcgagggaggcacaattgcagccctgtggcgccacctacggcccagactaactcgcangctttctgccaggccggctcgatacaacttctgacatgtggattccagggcctcctggtggccattcaagggtcctacacactcaacctcanagcangctggccagagaacagcanggatctgagggccgtcgatgtggcccagggattgctcagcttccggngacggcccagccaggaganggccctggttcctattctcttcctttatgctaataaaa

SEQ ID NO: 988 - DNA, 498 bp, Mus musculus
tgaggagcctgtccagcatgtgattatctgtatcagcaccatcttgtctactggaccacggagagaccctggggcaccttcagctcatctctagatcctagctggcaccgcagcacctggcttggatgaggcaatgggtgtcaggagccatcaacagtgcctgcagctaacacagaagagcctactgtgcaccaggctctgtgtcgacacgtcacctcagcattcctactaattcttggagggcactacctacattttactctagagggaacagggacacaacaaagaaacttgcaaaggtcataagagaattaagagataattcaaactctggaagttttcctccatattcttcatttcagacaatagtggtggggttcagaacatgctaccccaaaacacatacgtcaccttagcatgtgaggaaattagagaagcaggaagactttctgatccccactcgccttgcttgcagaattctccatctcttctctaaag

SEQ ID NO: 989 - DNA, 269 bp, Mus musculus
  misc_feature (1)...(269): n = A,T,C or G
gactgagaactagctagaagagtactgaatgtgacaagaagaaattgaagatggagacatagaaacactcaggatgagacacccctcccaaaagactcctgggagctttggccaaggcaacggggacagacatccttcctccaggaggccacaactactaaacctacccaaaaaggaccagcaactgaggaccatctgagccttgggagggagcactcacattcaantcaccacgcccacttacccaggttcccaccaacagaagttac

SEQ ID NO: 990 - DNA, 188 bp, Mus musculus
  misc_feature (1)...(188): n = A,T,C or G
tgagctaagagaagtctgcttgagaggctctgctccatattgnacttctgggtttgtgtttggagatcccgaagggaaagtaagcaacaacaacagaaaagcctcagcaaacggtctctccagaaggcctttcatctctcatctccacagactgtacccaactggacagagtcacagtgaaatatagt

SEQ ID NO: 991 - DNA, 146 bp, Mus musculus
  misc_feature (1)...(146): n = A,T,C or G
gcaaggctacagcagagcgccctcctgnatgtgctnaacaaggctcagcncacacatntgcattangctgtnatgctatgangaantgcttctttttaggtctcntantanctttgcttatggtacatacccaaagattgtcttgg

SEQ ID NO: 992 - DNA, 288 bp, Mus musculus
  misc_feature (1)...(288): n = A,T,C or G
gactgagatgcaatctgacngctgcctcacactcgggccaccatgaccttcccacggtgatggacgacgccttcaaacttagaaatgaaacaaagcaggaggagcgaggagaggacgcagcaggcgatttccgggcatgaaaacttgagagcctctcactctacaacctatgctttatagcaccaagtacaagtattttggaaattttggtttgggagcctagggtttagaatactaaattgatgttttctttggaaacatcaggtagtcaacttctaaaaaaaaaaa

SEQ ID NO: 993 - DNA, 489 bp, Mus musculus
  misc_feature (1)...(489): n = A,T,C or G
tgagctctcccaaaggatgcantgcatgcacctcagtattctgtctaccaagaaccagggttataagactacggtatatcagtgcaaggaaaagctaccgttccatgaagaaagacactgtgcaatgatctgttgttacctgtgactccacagtccctctccctctgccagaactattttacccgctaaaccaggggtgtatctttggactctttgccatcaaacatcattcttcttcccaaaggaattttaaatacttcttttcaagcacagaggagccagcttttcaccccctgcctctgaaagaacctacagagatcacaaagatatatttgacccggctcagatgctccaagaatacagttcacaagaccatcccacttcattaccacagagggaagagcctaagaatctgatcccttcggcaccatgcaagtgattgtttttaagatgcatttggccagggctacncagagaaaccctgtctca

SEQ ID NO: 994 - DNA, 114 bp, Mus musculus
  misc_feature (1)...(114): n = A,T,C or G
gcctgcactgacctggaactgctgatgncccncttntccnggctgaaaggangagggtcaggnggnnaccggccttggccacatttacacactgacagaaagtccacccccagg

SEQ ID NO: 995 - DNA, 270 bp, Mus musculus
  misc_feature (1)...(270): n = A,T,C or G
ggaaggcataaatgcccgtcctgtgctttcctgtggtttcccccggnatccatccgatgaggcttcagcccccaccacctgctcagnatcctctnnttcctttccggcgaactctgcaacttgaagctctcctgctttgtacttacatcctctggcatgctgtcccccaccccacccncaccccgtccgtggtctnaacttagccagaatgacatcatggtgcctacacctttaagattatataaatctgtgatcccgcaaaaaaaaaaa

SEQ ID NO: 996 - DNA, 319 bp, Mus musculus
  misc_feature (1)...(319): n = A,T,C or G
cggagggagcccctgctgccacctaatnnctgctcctctgcttntcccctgctcccgttccttttntctananaagactttcaaggcgacntttgcatgtntgaagntctactttngctganaagaaaacaggttntcctttnctgcctcttagttcanttnatggttnnagtgatcctacccctacatgagatgnttagangatggaaancgngtctntngccaaacttgaccaccctcccagtttngggttctcctaaaaanactacaanagaaaangatttaggactgagaanccncttgacaaaaataacacccg

SEQ ID NO: 997 - DNA, 108 bp, Mus musculus
  misc_feature (1)...(108): n = A,T,C or G
cgcccatctcggaggcagaacanagaatnatttgcttcggnatgtatntactgcctnnaatcgntgagttcgagctcngtacccggggatcgaagtaaagaaaaaaaa

SEQ ID NO: 998 - DNA, 154 bp, Mus musculus
  misc_feature (1)...(154): n = A,T,C or G
gactgagcctggtcacttgtaccacgaggcccatagaagaagtccgtcgtccttaccgnccccccccntccccatnttnntaanggaanaggaaagatcctgccngggcnggaggccacggntaggatnctgatcgangagggcccgagtttgg

SEQ ID NO: 999 - DNA, 209 bp, Mus musculus
  misc_feature (1)...(209): n = A,T,C or G
ttaaccaaaacccctnccttaggaaaactatttccttggcatgaccttacccctttgggngggcttttgccaccggggnatncccttcctntnttggggcccttttttggggcnaaccttaatttccaggagnaaggaaggaaagccnccatgggcacccgtagggggccttcntgggcttggttgccttgcataacccaggggcttgg

SEQ ID NO: 1000 - DNA, 199 bp, Mus musculus
ttcccctcccatctccagccactcagtgcagcagccccactcttgcctggtcccggactcggggaagctccgctgagaggaccctgcactctgctgcccactaggctcctggcaccttccgtagccagtgtctgcatccacccggatccttgctgggcagcgcccctgggacgggaggatacagtaagcatctcagata

SEQ ID NO: 1001 - DNA, 391 bp, Mus musculus
  misc_feature (1)...(391): n = A,T,C or G
aacgagtgcaacccattggccgnngccttgtaccaaaaagagcctgagcaatgcagccctgaagctccnaagctttgcaagacattgagagcatgacacggtatgngnagagaggncatgctgactacacctgatggaatncactgctactcctttccgtcagctgcttgctaagtcaagtcacgtnnggngatcccagaaatgccgcanaacctganacctttgngcnaangagngatgaacttntgccttgctgagctcactgnntgaactgctganccactgncccgatgcacctntgagaagtntaagatanggtctgagaggngtcncttccagcntgtgcagaattgangncaccagaggaccgatttagcccagccatccagag

SEQ ID NO: 1002 - DNA, 169 bp, Mus musculus
  misc_feature (1)...(169): n = A,T,C or G
cctccggtgtgcatcagggtatgcancggtgttgtaagcaggatncgcccacccctcccctctaaggcagggncatcgncccttnccctccnatctncagccactcaggngcagcaagcncaactcttgnctggncccnggactnggggaagctcccgctgagaggacc

SEQ ID NO: 1003 - DNA, 207 bp, Mus musculus
tgagtgttggggattggatccagggtcttgtattcaaggaaagcattctcaaattgatctaccctccacagcctgattgcgaagaacactatcaagccattggctacctgtaactactattcttatgccataacaggagtataaaaatacatcctaatgttaaacaataagcatccctcaagaatttagttaacacagaaaaaaaaa

SEQ ID NO: 1004 - DNA, 350 bp, Mus musculus
  misc_feature (1)...(350): n = A,T,C or G
actgaggcagacatatccctcaaaggacatctgagctgccaaacgtggagaagccaatctgaacttgagtgtgcatgcagtcattactcttgatgcattgcacttgaactgcgagctcaaaatataaaacaagcgggggcttgagagatggctacatncttttaagagcaatgaccattctcctaggagccttctggggtttgattcctaccacccacagaagacttacaancctntggnacagangaccttggcctncaggacnctacagccaatgatgctgagaccttttccgcaaatgcaaataaatggaaattttaaaaccaaccaaccngccaacaaaaaacaaa

SEQ ID NO: 1005 - DNA, 299 bp, Mus musculus
  misc_feature (1)...(299): n = A,T,C or G
actgaggtggggtcacctgagtatcagtgtctcagctaaaaaggtgaagacgatatcaaggtgtccagaaaacagaatgaggtgtccaggtatagtcagaaaaggctgccgtggactctgtcagccactctgtggggcacacgaggatgtcaggtgtgaaatgtggtcaggagcagtgttcagaccccagcatgagtaccaggcaaaccgctggacacagcctatatgancaacagccagcctttctgagagaggggacatgtgttctgcatttcactctgcagtggagtgtcggagtg

SEQ ID NO: 1006 - DNA, 267 bp, Mus musculus
  misc_feature (1)...(267): n = A,T,C or G
gactgagctactctccactctgaatcctggtgagattcttttccacggtggatggcaaggtctctgggcgcatgaaagcatcctacctgcccaggttctgaaggagactccgtagtgccagcaatactgaactgaatgccctaatgccagctacagatctctacatataactaccttttaatttgtgtttatccttgcgtgtggggttttttgcctgcatgtatgtntgtgtttaagataaacatttgtttttgccaaaaaaaaaaa

SEQ ID NO: 1007 - DNA, 489 bp, Mus musculus
  misc_feature (1)...(489): n = A,T,C or G
gactgaggcagccgaggcttttgtcctgacaagcaactaggatacagtcgtggttttcttgcctggaatatgagtgactatgaagacatcgagcagagaaactctaaacgggcgattctggttaaacagagtaagttaataaggagcaacctgccctccaggctgcccaagctgcagaaaaagaagaacaggnatnttngnnntcatgnnnaattntttnnggggaanganaganagtgntagnccnggagcnnatcctgaaacccctgncacnnnnnncntgcntggcatgntcacnnanagancccttnntnantngtagaagagtcctcagaactcactcgcacagaacttaccatgcatccaagatggcgatcttgcccaggacttaccatgctttgcctgcttgctcancagccattactgncatccctttgaagcagnctgtgagggagctgaatttgncctcctgggaaggtcctgccccca

SEQ ID NO: 1008 - DNA, 285 bp, Mus musculus
  misc_feature (1)...(285): n = A,T,C or G
ccgagtgtccgtgagactctgttccaggcagggatgaggagtacagaaaatggcatttggtgtcctcgttaagaagtttaagagttctgggattatgggggngctccaccatgcctgnctgtcancccagttcctaaaacttgnctggcctgancggaagnctttgcagangtnngnaancgtntgtctagctacctgaaaaccaanantcncattcagatgtcgtactcanagcaccgcgccatttccaagtggctgaaataaaatgtaagttgagtgtcaaaa

SEQ ID NO: 1009 - DNA, 103 bp, Mus musculus
  misc_feature (1)...(103): n = A,T,C or G
tcagtatcaactatgaattggnatncaaaacaagagaatgngncccanacccccnccatattctaaaacccagtcntctatcttgcacgcattttttaatgac

SEQ ID NO: 1010 - DNA, 510 bp, Mus musculus
  misc_feature (1)...(510): n = A,T,C or G
gaactgaggcctatggctagcagctgcctggagccttgggcctggcttccgtgtcagctctaatgagctggcagccaagaagaggagtctgctgtttgggactggaatccaccttccagaaggttcctgcgtaattgacaagaagctcaggcacaggcaaagaggaagccctgccctgactgccacaggggagaagaaagacagaaggaagtatccaggctttctgcagatgttcaagttcccagctagctcctctctccggctgcatttgaagctgggcaggaagaaagacaacttgcttccgccctgtgactctgcccactgccagaggggacccatgcgtgcccaggcctctgctcaatcccttctctcttcttccttctcttctttggaacgaagcaagaatgaagggtggggcagatggatggatgggcggacctgaacccgaaggcctcttcagctgtcttgggaattattttccggggacantnagggatcaggaggactatt

SEQ ID NO: 1011 - DNA, 113 bp, Mus musculus
  misc_feature (1)...(113): n = A,T,C or G
accccccccctattcaggganaaacccaccactggacanangaaggggaganggaattgcccnggggagcggaaccccattcaccncaggaccaccgcacccggcaagaaaac

SEQ ID NO: 1012 - DNA, 169 bp, Mus musculus
  misc_feature (1)...(169): n = A,T,C or G
tgccctctgcctgcactgncctgngacnctgctgagccccccttcatcctggcgtgatgggggaggaggnacaggtggncccnggccttgggncacctttcaccctgacngaaagtcccnccccnggtgttnngtgangacagatgacccgtgtgacttctcctcaggg

SEQ ID NO: 1013 - DNA, 101 bp, Mus musculus
  misc_feature (1)...(101): n = A,T,C or G
tctgagcagctgcctcttgtccctgccgttgngacttcccatcatgacggactgcaccctgcaactgtangccactaataaacccttccttcctgaaaaaa

SEQ ID NO: 1014 - DNA, 129 bp, Mus musculus
  misc_feature (1)...(129): n = A,T,C or G
tgcgttctgttctaggagcacgaggcntnttanaagcctcatccagattcangnaagaggctggtgaaacttccgacatctgntttggaaattgatgaatntnnactcggccacatgatcaaaaaaaaa

SEQ ID NO: 1015 - DNA, 114 bp, Mus musculus
  misc_feature (1)...(114): n = A,T,C or G
acgcaccatcccaccancagtnctcctngaaacacaacgcacccctncccaagaagtcctactccaagnatggatangnaggggctacagnatgtatgaggactaccaaaatga

SEQ ID NO: 1016 - DNA, 136 bp, Mus musculus
  misc_feature (1)...(136): n = A,T,C or G
agggtcggggaagtagantaatgttttcctcgaagggaaccccnccaacaacaancgattgggtttttcngggcttttnagaaannngnttaacaggcccctcgnaaatttgncctttnaaccaaccccgaccccc

SEQ ID NO: 1017 - DNA, 160 bp, Mus musculus
  misc_feature (1)...(160): n = A,T,C or G
taccactttgcatgcctgncgctcanggaagccaaagaggacctgcctcntttttggttntgacacagnccggctctgcaggangggcagctggcacctangtggnnggcaagaaaanctnaggntcatnnnccccatctctgacccataactggagctg

SEQ ID NO: 1018 - DNA, 113 bp, Mus musculus
  misc_feature (1)...(113): n = A,T,C or G
gactgaggcaagacagatctagaggacatcttaaagnggacctcattgattgaggaatgctgaccctcggatgctctncacccccaccgnatgctgcagctcaatatggccga

SEQ ID NO: 1019 - DNA, 449 bp, Mus musculus
  misc_feature (1)...(449): n = A,T,C or G
gactgaggaagagttcggacacagtggaggggattgcagcgggagagccagactgactagtgagatgtgagatctctgtgtttgagatccttggactgtaggccaacagcatcctgagcacagagtggctgctttgatgacctgcaccttatggcaaggccaacaagaggatcacccacatcctggagattctgatggatgcttaaatgatacttcaatgaagagcactnanagantgnatnctnncancaaccatgttnagnnaggntggggatannctnctagccttcngaananaccctanntcctgntntgcgggctgngagatanccngagngncttccgaatggaaccntgcccngacttgnagaccntgtgagaacaacngtgctttccgttgcagccntgnactgantttgctgacaatgaagataagaacttgctctcaa

SEQ ID NO: 1020 - DNA, 463 bp, Mus musculus
  misc_feature (1)...(463): n = A,T,C or G
aggaaccctcagagacttanaggcggaangtgaatgaggtctgagactgaagttctgtctcaacagtaactaattctttgnaaactgtggaatttgcagattctgcgctacgcaacagtcttcgatgagcagcgtcacacatacagggtctcccacagtactgtctatggcttctgcacactgccagttgccctagcattctagactcagacacanttttactcagngtcctcctccagagggcaggtgactgcactcacttcctcttcatgtgctcggtcagcatccttggattcaaaaggctctttcagctcggggcttccgtgaagggcgccaatcnctctcagtagttttacgcacaaaagctagaaacactggaaagtcaaataccaaaaanctaacatganaattatatcaacactggncagaggcngatatataacactagttatatatgataagg

SEQ ID NO: 1021 - DNA, 158 bp, Mus musculus
  misc_feature (1)...(158): n = A,T,C or G
gtggggtctttcacacgttacacgacgggtccagcgagttaccactgggnnggaaaccccctggagnaaacccnttttcccccagggnaaaggttttacnnccttggcaggaaaggggggcaaacttactttttttnaanaacggggaaaaaaaaaaa

SEQ ID NO: 1022 - DNA, 233 bp, Mus musculus
  misc_feature (1)...(233): n = A,T,C or G
cgatgacagctttggatcggagagcaactgataagactactgacatcatgaacgaggcatcaggggcaggctggttgtattaatgataaagagtcccatgaagaatggaaatataagatgctgagtcagatgtgggtcagcaagaatactgctttttaaaaaaaaatttaaaacatactaanaaaatatctaaactttatgcaaatntnttactttacctctaaaaaaaaaaa

SEQ ID NO: 1023 - DNA, 123 bp, Mus musculus
  misc_feature (1)...(123): n = A,T,C or G
gtggaagacagagaagcgtgcaagaatcggncctctcctttgaccntgnggatnntanggaccaaactcaggtattcatgcttggcagcnaggtgcctnnacgcactgagccattacacgact

SEQ ID NO: 1024 - DNA, 158 bp, Mus musculus
  misc_feature (1)...(158): n = A,T,C or G
aagggggaaactttctggngaaaagggttgcggccaccngggggaaaggccattggggnttggggtttttcccattaattattcctanaccttggcccctcnggaaanaccggantgtaaattttcggaaggctttccggggtaaaccccccgggggg

SEQ ID NO: 1025 - DNA, 122 bp, Mus musculus
  misc_feature (1)...(122): n = A,T,C or G
ccttgaagggtaacagcaccctgangtcgtacttatcagcacacactctcatncttgtnanggaccttctcccagngnccagtgangaacaaagatagaattcttcttgaaatttcacatca

SEQ ID NO: 1026 - DNA, 121 bp, Mus musculus
  misc_feature (1)...(121): n = A,T,C or G
ctgaggtgtatttatcagcacacactctcattcttgatanggaccttctcccagngtccagtgangaacaaagntngaantcttcttganatttcacatcaaggtctcagttctgacttag

SEQ ID NO: 1027 - DNA, 411 bp, Mus musculus
  misc_feature (1)...(411): n = A,T,C or G
tccacctggggtgtactgccttgaaangacttcctagtccnnctcatgcttccagctngccactgngccacagcactnagcgcaggagctccgtgggggatctttaaatacaaaccntaacactagnnattttatttctcaaataaaatannggtgtatttcantcaganaganntgatntggtaggnccaagactttgggnaganggacatattttccccccagagaatacgaanttatcatgattgagtgggtntagtacttgctaatttaatnatgncttgntgtgagtataatgttaatggcaaanaaatacngnggaattanaangctctggnatatgattntagttatntatcatcatactgnttaaatgaaataaagnaagntgctttaagttaaaaaaaaaaa

SEQ ID NO: 1028 - DNA, 105 bp, Mus musculus
  misc_feature (1)...(105): n = A,T,C or G
ccaaggaccaaatgggggcttaccaccatacntantganaacngtctncctnttctgganggggctgaaganagctacnggggcttacatataataaattaataa

SEQ ID NO: 1029 - DNA, 115 bp, Mus musculus
  misc_feature (1)...(115): n = A,T,C or G
ccttgaagggaacagaccctgnagtcgaacttatnagcacncactntcatccttganatggaccttctcccngaggccagggangacaaagatanaantcttcttgaaattacac

SEQ ID NO: 1030 - DNA, 107 bp, Mus musculus
  misc_feature (1)...(107): n = A,T,C or G
aggccatactctacttcntgtggagctntcaacgntcggacnggaagcaaggctgnttccatatatactactgcctcnaaatcgacgaatcacgagctcggcacccg

SEQ ID NO: 1031 - DNA, 324 bp, Mus musculus
  misc_feature (1)...(324): n = A,T,C or G
cttctttaggaaacgacaggccaggatttctggagagagctgctgtgaagcccggtccacatgcccacctacgctttccattgctgaagtcaacacattcagttccaagcacancagttgtcaattccgccaggtccctctgaaggctgtttgtgatnggcgtatggagagcatactctgaaaactggtcagccgagggctcacctgaggttgntttttgngncacagggtatctgacctccagcttcttcagtgactaangagacccttctttcttctncnctctcttcatctaatactctctttnctgtctcaccgaggagg

SEQ ID NO: 1032 - DNA, 193 bp, Mus musculus
  misc_feature (1)...(193): n = A,T,C or G
cctcaggacaggtataaggcagcntgggttatcttctttgagctgggcctggggacactgctcccctgnaatttttttatgaccgcanccaannntttcacanaccgtctgnacntggaccagaatgagtcctnggacactgatcaatcatgcgaangcaccaaggccttggttgaccccacagaggccttgc

SEQ ID NO: 1033 - DNA, 333 bp, Mus musculus
  misc_feature (1)...(333): n = A,T,C or G
ttctggcactgccgttgtgaacaagagcctataattaatgcttacacatgagccnagatgggaatcacnngncttcaggttaaacaggnacccagtanatagcatcccttntacttttcctgccatggggacttttaccatttcanacagctggacgtggatacgcatgcctttaatccccagcactccagaggcagaaggataaatctctatggatcaaatgccatccagagttatatgatgagaccctgtctcaaacaaacaaaatcagctntatgtatacacagtgcattctaatcactgttatacccagcttctctatttccctcccaa

SEQ ID NO: 1034 - DNA, 536 bp, Mus musculus
  misc_feature (1)...(536): n = A,T,C or G
ctttgagattccatttacttatctgaagnggaagcgtgaaaatgagcagccgaaggaaacgtgctcccccgatgaaggtcgatgaagaaaggcaacagcagcttcactggaacatgcatgaggacctgaggagtgagccgctcaccatgacggtcggggaacaggcctgttcagatgcagactcttcttctgattgcatcatcatcgatgaaggccctcctgagagtgcacttcacagagataagaagaggcgttcagagactgtgagcgtcttagaggccaccgaggaagagacccgtttgtctgtgactttgaatgttaccagtttctccctatcgtgtgggataattcttgnaaagcattttctgggagattttgcttcttcancttctccccaaanagagtttagttgaacattttttntgaaaggacttttacatttgagncctttcagagtcaagcagncagttcctgatctatgtncattcananttgtaaaatgtngnagaancaagaaaatgttttttgaaggatcc

SEQ ID NO: 1035 - DNA, 102 bp, Mus musculus
  misc_feature (1)...(102): n = A,T,C or G
gacttcttttcctaccctctttagatgtgtggntgctgagnttggnacctgngaccatntagaaggctnttcccctcacaccgtntgggggatagctggctg

SEQ ID NO: 1036 - DNA, 166 bp, Mus musculus
  misc_feature (1)...(166): n = A,T,C or G
atcctgaagtctcccaanattgctgtantantcttagcaactnncantcctaacctgntnaattatagatnatnaaactgagccacattatggatttcaaattttgttggaccaccagaggaagtaagttntttcctaaaaaaagattttaaaagttttcaaaaag

SEQ ID NO: 1037 - DNA, 249 bp, Mus musculus
  misc_feature (1)...(249): n = A,T,C or G
ccctaaacctcctgattagatcagaaacnacaagccacntcctgctttattggagactcatctttnctgaggnncatcattncntccgattttcactactataaggaaaggatgaaaaccnttnttttgctttnggnccctatgtcctccatcagccaantgaccatccnntttatcatccatacaaagacnnttttgcactattaancaccatgcgaggacaacaggatgtaaaactgagactatccc

SEQ ID NO: 1038 - DNA, 200 bp, Mus musculus
  misc_feature (1)...(200): n = A,T,C or G
aggatcctgcgacagcttgctctatatccatagaggtgaaccagagacaaacctttcagttggccatggacttgntgaagcncaganncctgactttggccgctgagggcnaggctgacttngatntntantatcggtgctttgggagaggcgntaatttttanaactcatttgnggtttttctttcttttctataaagg

SEQ ID NO: 1039 - DNA, 440 bp, Mus musculus
  misc_feature (1)...(440): n = A,T,C or G
gactgaggtacatgtgacaacgccgcagctatgagtggaattttaaagaggaagttcgaagatgtggacgcctcctcaccatgctcctctgctcgggaatcggatgatgaagtctccagcagcgaaagtgctgacagcggggatagcagtnaatccatccacctcaaatcacttcaccccttcctccatcctgaaaagggagaaacgggctgaggacnaanaatgtacacttcagctgtgncaccgngtactacttcaccaggaggcagggcttcactagtgngcccagccagggnggcagcactctggggatgtccagtcgtnacaacagcgngcgccagtacaccctgggcgagtttgcgcgagagcaggagcgcctgcaccggnagatgctgagagaacacctccgggaggagaaactcaactctctcaaactaaag

SEQ ID NO: 1040 - DNA, 119 bp, Mus musculus
  misc_feature (1)...(119): n = A,T,C or G
ttttcctggtgggcanccgccttctgtacctagcnttacagaactttgggaacaagggaagaaccatgacttantgagagagaagccactggtgggtcnctgttccctcccttacgcta

SEQ ID NO: 1041 - DNA, 477 bp, Mus musculus
  misc_feature (1)...(477): n = A,T,C or G
gactgagcctcctggttgcctggcacagcaagcagagtgggctttccggtacatacgtgagagggtcctgccgcttaccctcttccatgacctgtggcttccccaggctctggttagattctatcttggctcacagaaccccgtgtgcactgatctccttgtgtttccaaaattgatgggttactatctctctgccctcttcctgatcctgtgaacctagcattgtacttccttccctggggccttcgctgttccctgtttcaagacgagcacctggcaagttcagctggagactctgactaaacactgctcctcagactgtcttcttagtgtggtccanattccaaggcatctctgtcaccaattacccaatctcacctagcctcgaatggattaccttactccattgtaagcttctgttcttattgtctcctcttcctccaattatgctgtaggtngttacttcaaaaaaaaaaa

SEQ ID NO: 1042 - DNA, 131 bp, Mus musculus
  misc_feature (1)...(131): n = A,T,C or G
ggagaactgtgttctgggaccaaaccangagaagagcctgagtgtgcagaacagggtccaggacttccagggagccagcctgcttgtctgcgccagggaggtcatcgccagcaacctctcccggctggaga

SEQ ID NO: 1043 - DNA, 147 bp, Mus musculus
  misc_feature (1)...(147): n = A,T,C or G
taggagagaaacagtggaccctctggggatcaagaggangcancagccccagcttttccagtttgactgtgattncccatttttgacctctttgatcgtggtttccctatgcacccgcncggagccttngcatagggctttttcccc

SEQ ID NO: 1044 - DNA, 200 bp, Mus musculus
  misc_feature (1)...(200): n = A,T,C or G
gtgaggctgctgagcttcnacaatgaagtggagctggccaaggtngnccaagagccnccctangtgccaanatggttctgtgcattgctacccaggactcccactctntgaannacctgancctgaggttnggggcgtccctnaaatcctncaaacatctgctcgagaacgccaagaatanccacgtggaggtggtggat

SEQ ID NO: 1045 - DNA, 337 bp, Mus musculus
  misc_feature (1)...(337): n = A,T,C or G
gactgaggatggacaatgctgaggcctgtttcattttgagtagccgctgcgaagtggatagaacctcatctgatcnccatacaatcttnnnngcntggnctgtnantgattntgncccanattgtnctttgtttggtcncgatattacaacccgaaaacaaattccanataaaaatttgcnaggnaagttttgctcttcantgacagcctttgaattcctctaataattttcagttttgtttngttttgttttacatttgagaagttagtggcacttcacttattcatngntntatagaacagacagaattctcttttaagcatctttttaaaatac

SEQ ID NO: 1046 - DNA, 121 bp, Mus musculus
  misc_feature (1)...(121): n = A,T,C or G
gtatggacacctactgtaacctnactnntataggctacaagatgggacnaccctnatatgagaananccatgnncnagttgtcgaagacctacangggaacctttattatcgttcaagcta

SEQ ID NO: 1047 - DNA, 114 bp, Mus musculus
  misc_feature (1)...(114): n = A,T,C or G
atcggaatatggacatcngggaattgatcactgtttctcattggctgattagatgcactttctgtccctccctctgtcctcagtgacatgcagggtgtttttgaagggacggcc

SEQ ID NO: 1048 - DNA, 338 bp, Mus musculus
  misc_feature (1)...(338): n = A,T,C or G
actgaggtggttgtgagcnctatgtggttgccgggattgaactcaggacctctggaagagcagcggtgggttgacttcccaacgattcattgtacatccaggattgtaaatgaagatttcaaaggagaaaataaaattaaggtctatgtagagagatgcaatttgatgcaggtaataggattgctcagctgtttttatatccctacatcaaaggcaaagccactccagtagaaatagcaggtgaggtcacctgaaaaccttgtcactgacctgaaaaacgcctattccattgaaaatgtctctgtttataatttccacccagcataataaatggctta

SEQ ID NO: 1049 - DNA, 115 bp, Mus musculus
acgcacatgccgtccctgctccccagacacaacagaaccaacaattaatcgagtgtccggaactcctggagtcatcatgagatcatgacatcacctcacccacaggtactttgat

SEQ ID NO: 1050 - DNA, 149 bp, Mus musculus
  misc_feature (1)...(149): n = A,T,C or G
cctgccaagaaccctccaggcagnnggattgtnacaggatgcgagagtgtggaggcctntgcaacagcggaaacggctnntcaccgnagccatctttgtgtcacctgagccgggagatcttattnattangntcattaattgcgcaatg

SEQ ID NO: 1051 - DNA, 277 bp, Mus musculus
  misc_feature (1)...(277): n = A,T,C or G
agatagcttacagccagcctagggagcagagcacagntctttgatgatgccggcaagagaagttaggaccatatacagctttaaaaaaccaaccaaccaaccaaccaaccaaccaaccaaccaacctggatttcaccaagagcctatatggaaaaggatgcttccacagagcttacaggtaggggcccaggntnggcaatttcttgactcntggacacagagcctagttaagccggcctagacttctgacttgtggaattataacttacttaataaa

SEQ ID NO: 1052 - DNA, 109 bp, Mus musculus
  misc_feature (1)...(109): n = A,T,C or G
acccatgatcacaggtgcctactgatgcttgnaagataatggngnancccttggagctgagnnttttatacacagtngtgatgggaaccaanctgacagtaactgctga

SEQ ID NO: 1053 - DNA, 149 bp, Mus musculus
  misc_feature (1)...(149): n = A,T,C or G
tgaactggattggctaggttgatcggnccnccnataggtgcttnggtcaacacattgaatacttacttggctccatncntannnagnnctgtgggctatgacngaccacctttacatggaaanagantatctctgacaaaggaggatgc

SEQ ID NO: 1054 - DNA, 131 bp, Mus musculus
  misc_feature (1)...(131): n = A,T,C or G
ggcatcatcccactgctgaangacgtttttttttttnttggaaanacatgacanacancccacaaccctnatgaaggagtttgagccacaggacccccggcctcagactcanaaactatagtgaggtatgg

SEQ ID NO: 1055 - DNA, 195 bp, Mus musculus
  misc_feature (1)...(195): n = A,T,C or G
tttttgattgactatcagnagaggnagaggggctgnccttntggntntgggatgattgtgnggnncccccttgcgcgggccacctgatngannnctngggctctaacaggcaaaanggaggctctaccaccaaaccgagggcacagngngaccngctgcctcaagcagctatnacatcccagccctgagggactg

SEQ ID NO: 1056 - DNA, 114 bp, Mus musculus
  misc_feature (1)...(114): n = A,T,C or G
gactgaggcctgattaacacttttaaaattgtgttaatnagtgaattaagcntgncccanatagtgagngcctgtgcantcagaacacagtganaccgtgcctaaaaaaaaaaa

SEQ ID NO: 1057 - DNA, 315 bp, Mus musculus
  misc_feature (1)...(315): n = A,T,C or G
ctctccctatggcccggngtccacggagnagcagggcatggcatttcgtcctgagcgcagcccgccnagatacagatgcccgggctgtggctctggcnggcagntntaactggggctatnactctgangggcancacagcgactccnactctgaccctgantactcctccctgccaccatccatccccagtgctgngcctgtgacaggagagtccttctgtgactgcgagggccagaatgaggctaccttctgcaacagtctgcacacagcacaccgtggcaaggactgccggtgtggtgaggaagatgaggatt

SEQ ID NO: 1058 - DNA, 111 bp, Mus musculus
  misc_feature (1)...(111): n = A,T,C or G
gaaacgtcctatacgcttggtgttgaaagccctaatccaaaacgggaactngttgnaaatctttatagtcttgctggggngagatgtaaagggctagagaggttggcccag

SEQ ID NO: 1059 - DNA, 116 bp, Mus musculus
  misc_feature (1)...(116): n = A,T,C or G
gactgagcagactccatntngagaatagatgactcctncgaaagaangtcctaccagctaccaaaagacnnnngacctcagccggntttnaaaaanctcctactacttgctgttgt

SEQ ID NO: 1060 - DNA, 255 bp, Mus musculus
  misc_feature (1)...(255): n = A,T,C or G
ctgcagaatggacccctgtttgtganggacnncnttancatccgatgggncgcccaaacaggcttcgtggagaacatnaacagcatccttanagagtacaagcaggagccnnggattactgccantnaagatctgnatccttggtcctcctgctgtgggaaaatccagcatctctgaagagctggccaagtactacaaactgcatcacatcangatgaaggatgtgattgctgaagccatagccaaactggaggc

SEQ ID NO: 1061 - DNA, 373 bp, Mus musculus
  misc_feature (1)...(373): n = A,T,C or G
tgagatgcagagtcccgtgtaacaagcaggaccttntcaagtacacactaagcatatgtctatcattgagccacactccagcctggctcccgtgcccctgaagagcatgtgacaagcctgaactatggcagattcctcttgtcatggtttttccggaagtatgccacacccaggaccttcaaaanggggaccactggccccatgtggctactcaaaatgcaaacgcccagtccttcaaccacactgaagagacaacctagtggggcccacggtcgctcaggtgaannnnggggaannanacatgcnggagtnggaagagtcnctagcatgcatanagccntgagctttatccgtacatcccatacaccacgtg

SEQ ID NO: 1062 - DNA, 114 bp, Mus musculus
  misc_feature (1)...(114): n = A,T,C or G
cccaggacctgggggcatttancctgggaatgcctagccagganaagggnaccttaacntggctgcaatagntatanaacattcctnnncctttgtgggcagtaaatgaaagat

SEQ ID NO: 1063 - DNA, 466 bp, Mus musculus
  misc_feature (1)...(466): n = A,T,C or G
actgagagatagctgaggtgaagagcaagagctcgccggagccccccgcatcagactggcttcgcccaagaaagcaaaagtcactttaagtgtttcagagaccacaacgacctgttttattggtggaaccgtgataaattaactggaaatgtcaaaggcaaagggagcggaagctattgttatccagaggnaacatttantngctgangctcatattngatattantgccannagacagtacgccacacttgtagcactagnatgagcaaactgaaagactggcacccnggccggcngatcnggnncttntgaggttagnggaccatgtgtgtgccaccacgactgtctcgntnagatgctgccagaagacnngnactnctttggtgcntaattntncnatcngangaagannnctggaaatcagctgaaaagngattctgggncnccgtttgtttgaggattctg

SEQ ID NO: 1064 - DNA, 137 bp, Mus musculus
  misc_feature (1)...(137): n = A,T,C or G
ctgaggcgccgcggctatggccggagtagccgccggggtatnggcggaaagatgcaatccgtctnagngaagccctntcttcctgccatttcctggnnggcagacctcgacgtnagtcaccacatcaggctccgcct

SEQ ID NO: 1065 - DNA, 124 bp, Mus musculus
  misc_feature (1)...(124): n = A,T,C or G
acaaacatctggagaatttcctcanagagaaaagactagagaacataaaaccctggcagcctaactcctcctctggatgagagaactatgccccaaggataaatctcacccttcctgaactcta

SEQ ID NO: 1066 - DNA, 233 bp, Mus musculus
  misc_feature (1)...(233): n = A,T,C or G
gactgagagttttcctggcctgcccaatcttctccaanagcgccctctgctggatgacatnaggaccccgacagcctcagccatcttggaagtanagccaactggagttttgagagaataaaanggtggngctgatgtnactnaccggagncctcaggggggagactatanntgcagcggtagcttcntgagtagaggaaganagattttaccctggcagtctttctgtcaca

SEQ ID NO: 1067 - DNA, 255 bp, Mus musculus
  misc_feature (1)...(255): n = A,T,C or G
actgagggaccggccgcccatctggctttagagacattnnggagaaccaanttncnttcctcaggatngcccagncngnctttgtcgtgaatacagngatgacgggatactggccctggtgataagcaagcagngttcaaaggaggggaagaaaatgtcatacaatggatgtaattagattcttattttctctgcaaggacttaggaatgcatatacacgattgtgtaaaggctttctctcacacaccaaaaaaa

SEQ ID NO: 1068 - DNA, 186 bp, Mus musculus
  misc_feature (1)...(186): n = A,T,C or G
accccaaagttcatgtttctctgccanccggccgtttaaggccggactntttagngaatctnttccggntttncaccctcctgagccncatggcgggncacancctgnctnnccttgtggnatcctaaaaatgaatatnattagttcnttatatatacagangggtaagacattcaaaaaaaaaaa

SEQ ID NO: 1069 - DNA, 375 bp, Mus musculus
  misc_feature (1)...(375): n = A,T,C or G
tgccttctgctactgcaagctggaagtgaccacgccnanagganccattccacacctggcanacagaaatatgttcacaggcttgcatggcaaagcaatggaaataccggaacagcattatggacaggaagactggctttgaacatgtncatttgtcgccaccanntggttgtttgtgtgacttgcagtggtagagaaattacagaactggggttnntgagtcacanagttctgaagttctgaaatggaaatctagttgtcaggatctcatagtagccgaggatttcataccattacttgaaagctcatttttctatctttcatcgtaaattattctttatgcgaataaagccctgcctccagttgtgacctctg

SEQ ID NO: 1070 - DNA, 248 bp, Mus musculus
  misc_feature (1)...(248): n = A,T,C or G
gaacggacagaagttggnaaagagaagagancaggaggnaggacaatcagagnttcagtgattcttgcctccancaagggcntccttaactcaatccaactttgggccataaagagaaaaacngaaatcatcttcaaaacactggagggttttttccctaacttgagaaatacaccttaaattcttgaaggnattttaaaaagaaccaccatgccctataaagnacttgcttatgggctttaggtgtt

SEQ ID NO: 1071 - DNA, 267 bp, Mus musculus
  misc_feature (1)...(267): n = A,T,C or G
ggaacgagccagactatgccaccctntactaccgnnngcatcctnnggctggggacttcagnannacttccctgcctnaacggggtncaatttgacaagtgccgaatccgtccttntgngntnaagcctcctgngggctctgggaaaggnttnttgtccatgcaaagnctggcnncccacaagggccataagttttggccangcaacggaagcctgcacactntggcctgtcacccacccctgagccctggacctcgggccattcag

SEQ ID NO: 1072 - DNA, 460 bp, Mus musculus
ctgcaaagtttaaagcccttgacctcaggcactctgaaagaatgtcctctacagctacagattcttcgtcttcattgcctgtaatttggcttgaaccacaaccctcaggtgctcttccaacacagtactgaagaagtgctgcaactaggaggacagagacaactgatcagcgccaccaccagacgtctcactggcacaaatcaaaacagagttcctgggaaatagcaaaaccattttgcaaagagcattgatggctactaggaacagctatgcagacctccagcatgtgtccctggggaggctgtgagtgaggcagtgtgattatgaccatacctccccagaagggtgacatgtcagccggaaggagtatccatacagtaagaacttggcctactaacttccctgtttccaaagtacatcatagcgctcaacaaatagttactaactgcatactggatat

SEQ ID NO: 1073 - DNA, 196 bp, Mus musculus
  misc_feature (1)...(196): n = A,T,C or G
tgctcagttcctgaaacctgccnagnatncactangaggccnncnatnttgnaccnaaangggagccntncccgngttgaccatggcctgcatacacttcttcccagganaaggggaatgaggaaggtgggggcctcaaaagcctcctttcctttctgttnggctncctatgtctttattctattttttgtatctg

SEQ ID NO: 1074 - DNA, 114 bp, Mus musculus
  misc_feature (1)...(114): n = A,T,C or G
taccaaaggatagaaagttctcgaccncgcagatcttgnanggtggnggnntcnanttttgagggnagacaatagggggacagtaaagcccactttagttttcaaaaaaaaaaa

SEQ ID NO: 1075 - DNA, 124 bp, Mus musculus
  misc_feature (1)...(124): n = A,T,C or G
tgaccatgacaaacacaggggtgctgtnttcctgctgggntccaaggcctgaanggaacttctatcatggcctcagtngngctanggnctggggcctattacaagancaggaatggaggtattg

SEQ ID NO: 1076 - DNA, 323 bp, Mus musculus
  misc_feature (1)...(323): n = A,T,C or G
cttcttgaggaactctcnanggtactacaggannctgtggangnncccttatcncggccnngctcncatgganaatccnctttgtganggcgacctantatgagaggtcatccnccctttgctannnncgggtaaaaggcagatcacnctttaaagnggatntgngctccagggnagggaatgaccgtggagtgcatagagacatacaaacctttatggaaatgggaaccanngcatcangtgtgctggcactcaggaggtgggaagaggaggacangagttcnnacccagcctgtgacacatatgagaccctcgctcaagaa

SEQ ID NO: 1077 - DNA, 157 bp, Mus musculus
  misc_feature (1)...(157): n = A,T,C or G
cagacacatacaagaaaaaaggaggggaaaatggcctnncatcancatcacttcatcacaccnctgtgtncnangggnancgatgtatcntattctgnaagtcgcctattctcctanaangtntaggancattctttcacctgcaccgcttcgcaag

SEQ ID NO: 1078 - DNA, 137 bp, Mus musculus
  misc_feature (1)...(137): n = A,T,C or G
tgacctggaacactgggtatttctggagacagggactntctgtnnaanacnatgtttatnnctcggaactcanggatctnactgcctgtgattcntgagttctggnaataaaagngtgcaccaccactgactaaaag

SEQ ID NO: 1079 - DNA, 167 bp, Mus musculus
  misc_feature (1)...(167): n = A,T,C or G
tccagcttagacaggatacacccagnagagcacatggnncggntatgncagacacngnaaagaanatggtttggctgatgnnagaggattcgggacacangnntagncgagaagcgctggggttcaaagcctggaggcccctcatgntacngcttactgtcctgttt

SEQ ID NO: 1080 - DNA, 250 bp, Mus musculus
  misc_feature (1)...(250): n = A,T,C or G
ggcctaagaaccagggnnacccaaatgtaaactcccatctgaaataggaattaactcgattaaatgactaagcagcgcgggagaacaggaagaatgcctctttctccatccttagttccgggcctagaacattaacttgtatctgaagatggccaagtgtttgcctctgcttctggngggattaaaggccttgctgctactcctggctttcttcttgaatcttgnaagtctttctcttttctctaagagg

SEQ ID NO: 1081 - DNA, 252 bp, Mus musculus
  misc_feature (1)...(252): n = A,T,C or G
aacaaataatcacccctggaaagctgggcctgacgatggcatccagcactgggctnactctaanggaaatgctctgnaaacntgcacanntgaggggnactgcatttacnctattaggcnngaaaatntataggccaacctccgtttcagaanagagtttnangngggntcacatcggatnttnattttgccatntactctgagatntgttagggacagaaggtacctattangacccccccccttttaaat

SEQ ID NO: 1082 - DNA, 233 bp, Mus musculus
  misc_feature (1)...(233): n = A,T,C or G
accttgctcgaccactgagtttactgaggttgcttacaggagtgtgggtgaaggggttcccttcaggagcatgggaagcccaaaggcaactgcatcatctaaaccccaccccgatcatccaaaccccaccccaacagggctgatgagtccanagctgtcaagatgcctcaaggnagaaggaaatttccatacaagatataggttcttctcatttggctcagaataaaatatga

SEQ ID NO: 1083 - DNA, 140 bp, Mus musculus
  misc_feature (1)...(140): n = A,T,C or G
actgagctgccgccccagcgnncctgaaacaaacctcgctgcgcttgctcctgcactngncactcacangnccctgcacctgcactngggcattttgctgggagcgacagagactccgagggctggcaacaaccggaagg

SEQ ID NO: 1084 - DNA, 105 bp, Mus musculus
  misc_feature (1)...(105): n = A,T,C or G
gactgagagtcgactggaaacttacaccatggcgtgattagaccggttaaaantacgcgcagacntgaagacacgcctttaatcccagcaatcaggaggtcaggg

SEQ ID NO: 1085 - DNA, 144 bp, Mus musculus
  misc_feature (1)...(144): n = A,T,C or G
tcagaatgagattcctttattcatcanctatnccatctnctgtactcagttacagcttcagaaaatgaacgaggatgtctttgacaaaatnttggggcancatanctacagctggngatcatggaagactctgagttgtcaggc

SEQ ID NO: 1086 - DNA, 136 bp, Mus musculus
  misc_feature (1)...(136): n = A,T,C or G
actgtgtaaaaagcattattgaatgtacatataacataggaattaattaatagctagctattatctaacatcaaaantagctttcagattttctaatngataaaataatnacagncccaagtatccttctgaaaaa

SEQ ID NO: 1087 - DNA, 204 bp, Mus musculus
  misc_feature (1)...(204): n = A,T,C or G
gactgagcttctcaccgagggcacatggttgantatgaggacagccagttctccatcgccangctatcannatccaaagagaaacactgnnaangcgccagaattnagtgcnnaattcaggaggaagtgtgtcttctaggttctccaggaaaagcttcangctggattacagactngaggaggacgtaactaaatcataaaaaa

SEQ ID NO: 1088 - DNA, 153 bp, Mus musculus
  misc_feature (1)...(153): n = A,T,C or G
atagaagagcccccgnaaaatctttgtgccgcntgtcacagaganccaanaatcacgacatcatacattgatgggaatctctatgaatgtaaggactgcgagaaagtnttntgaaatanttcaaccctaantaancattacagaagaactcat

SEQ ID NO: 1089 - DNA, 224 bp, Mus musculus
  misc_feature (1)...(224): n = A,T,C or G
gtagtggcacaagcggcagcncgcaggaaactgaatggcaaggctgtggcaacatgtncaccatgcttccanagnactgnaactaagggtgngtgcacactcaanatcttgaccgtgtcttatcgtcnggaacggtgctgacaaataaacangagctnacnctgcaaagatggtttaagttggtcnagnacgcccaatgagantgagagaaaagattagcatga

SEQ ID NO: 1090 - DNA, 178 bp, Mus musculus
  misc_feature (1)...(178): n = A,T,C or G
atcttcagaagagcaggcanggctctaanccggggngccatcgncgccagcccnctncatttctttttnaaggaaggaaggganccccancnaaaggaangacaggncttgccctccctncttttngagccntttncccctttcacccatatacctcaataaaaaccaggaaaaggaa

SEQ ID NO: 1091 - DNA, 504 bp, Mus musculus
  misc_feature (1)...(504): n = A,T,C or G
gactgaggaattttccatccttggggaatgattgaaacagaagctcatttctcaagccagacgtggcgcacacctttaattccaggacttgaagacagaggcaggcaaacagaactctgagttcccagacatccaggactacatantggtcaggtttnctnngaatgtgncctctgncactgagcgnnatgccaagagggngggacttgaacctgtgagcangnggagggcctatgaactcgaangctatcctggaaagggctcctgagagagagaacggnaagntaggcagcnattntgattncttccatangaagagctgtgaatagatatanttctttaacatacctaanacncattcatgcccgaccccggaacctatcctagttttgcccgctctggagtantntgnttaatgttaccaannactanggaaactnaaaagtnttgtaacacattngatgangaagattaaagatacactntaacctctgggaaatatac

SEQ ID NO: 1092 - DNA, 121 bp, Mus musculus
  misc_feature (1)...(121): n = A,T,C or G
agcctgggctgctcttgcagattccggttccattcccagnatccacacagnagntnaccactgtctgcaattgcagtccaggggctcanatgccttcttntgacttctatggagaccaggc

SEQ ID NO: 1093 - DNA, 284 bp, Mus musculus
  misc_feature (1)...(284): n = A,T,C or G
tgtgaagagtttttgctcttcagtgacaatactgatgaagaggtgttagacttgcaacactggactggacagtgaactctgagcttgctactgctctagtttgntggaattngtggctctgtgnccagctactggctcctacagaccggangaagcagattgnagacagaagtgggagaaagcctccagctggnacattctcagaagggtagncctcttggctgntgggccctgtccagcctgccttatggagaagatgaactggttatcccaaagaaaaaaaa

SEQ ID NO: 1094 - DNA, 173 bp, Mus musculus
  misc_feature (1)...(173): n = A,T,C or G
gactgaggaggggtaagggngntgccctgtctacccaaaaaaggctaagaatattcaaatgaatgttaaaagatcatggaaaatacattattattaaaagccctcctgccacaatggactgagccctccaaaactaaataaaacaggcctttgctcctgccagaaaaaaaaaa

SEQ ID NO: 1095 - DNA, 502 bp, Mus musculus
  misc_feature (1)...(502): n = A,T,C or G
ctgcccgcccagagaggacgcctagcccacacgtggaaccccaagcttcggggtttcctaaaaagcttcctgaatgaagaaacagtgtggngggtcaggggaaacctgacgctgcccggatcgcatccagggataaatcagacaggaggtgatgacgtcttaaggaaccaaaagcctggcgagtgcccttccgtggtcacacactctaatgctgtcttctcaagatggaacctgtgcatagagaagcatcatttcatttgccaggctgccgcctttccccctcaaggtgcaagcatttggagaaatgagtttggtcctggccctctgttacccatgaaaagaagaggagctgagacagagagacatatgatcccaggaaatggccccccgttagccatgtgtcaccaacccgctcctcctgagcttgnaagtactgcagtcccaagacaagtgtgacatattcagctctctgcggtctgatgggtcctgccaggatttatta

SEQ ID NO: 1096 - DNA, 186 bp, Mus musculus
gactgagtctctatctgtcccagcagtattgctgtttgaccgacgccatccatgaatcagctgctgactacagcctgctcatgagccctggacttgctgagagctgatgagaactgatgggattgttctctgtcccttcaggggtcagcaaaccagatgctcctgataaatgtcccattgcctgaa

SEQ ID NO: 1097 - DNA, 127 bp, Mus musculus
  misc_feature (1)...(127): n = A,T,C or G
ggggctaaacccttaatttacactnatnanaaaggaagctctgtccagaaacnttgagtgcagatccagaancgggctccaacatttacaaaatatggtgcctatnanaaagttaaaaaagggaaaa

SEQ ID NO: 1098 - DNA, 113 bp, Mus musculus
  misc_feature (1)...(113): n = A,T,C or G
tttcacatcagggtctcagctttgacttaatgcaagtagctccaaccagccacngcgtgtggcnacacanncatcttangngggaccacntggtcctccttcggggcctgaag

SEQ ID NO: 1099 - DNA, 181 bp, Mus musculus
agctgctgccacatggcctgaggcaagagtaaggagtcagcaacaatttccacccccacccacagcatcccccaagcaagagttctggaatatccctagagccctagccaatcccacagacctccacacccctagagatcaagccgaccaatctagataaaggccatctactcttccctgg

SEQ ID NO: 1100 - DNA, 150 bp, Mus musculus
  misc_feature (1)...(150): n = A,T,C or G
agaagccccttttatgnggcatgaganttgggagangagaagagactcnganggnnntagctgctgnntccacctgtggnncgggcagcttanggaagatgtgcctctccttttcattntttctttctttttaaaaaattttatttctca

SEQ ID NO: 1101 - DNA, 161 bp, Mus musculus
  misc_feature (1)...(161): n = A,T,C or G
gtggaggcagcaggatagagttngagcctagcctggagatatacctcggagacagatcacgtaccgggcatcatgctgtggttngattccccagnatcgtnaccanggacaaaagantaattacattatntagttaagtgattaaaaaaatacctggacgt

SEQ ID NO: 1102 - DNA, 271 bp, Mus musculus
  misc_feature (1)...(271): n = A,T,C or G
ttgtacaatgttcagcctttgcagcggagaaagtaatgatggttaagaggctcagaagaagccaggagtatagctagctctgtaatagagcaatggctgacatccataagtctgggatccttgttcatgagagggaccacacacattcaccatgaatcttccctcctgataacatatgcccagagccatgtcgggtgccgccaccaccaaagattagcatccagctttgttcacataataaagtanaatcctgttccggcaaaaaaaaaaa

SEQ ID NO: 1103 - DNA, 350 bp, Mus musculus
  misc_feature (1)...(350): n = A,T,C or G
ggaacactgaggatanctgagcctacgcaggaggtccattgcttgngaaancaacacagcttgggacagcatgtnctccccgtgcagccctntctgnttgtagaatnccattctcttctctcttttcctgggcagaaaaccagggacagaagagtgctccctacgcggnaaggctganntactngnttacataaactcacatttntaaacaatcaggatgtagaggctgggacgctttnggngggggagtgcttgcctagcattctaagggttcnngagttncatctgcagccctgnaaaantatacnggggccatataataaatgctcacncaaatattaaaaaaaaaa

SEQ ID NO: 1104 - DNA, 113 bp, Mus musculus
  misc_feature (1)...(113): n = A,T,C or G
tattacaacctattaaaaaacctanaagttaaaangggctatttaatctattantctatngaaaatattnctgaatncaataaanctcttttatttaacctataaaaaaaaaa

SEQ ID NO: 1105 - DNA, 112 bp, Mus musculus
  misc_feature (1)...(112): n = A,T,C or G
gtcagccagccctggggctgtggagngancnctgctcttnaaaggacccgagtgagtgcctgcctgcaaagnagtttgcaaagncttngcatacacggctgccccaggaagg

SEQ ID NO: 1106 - DNA, 295 bp, Mus musculus
  misc_feature (1)...(295): n = A,T,C or G
ggtttgacgtgctcgnaggacaganatcctacatcnctncattcacttgacttggaccnctaccctcttggccccactcctgggtacccagagggnagntacangnccattnccaaacagtgacnnntttntgagactncacncgatggtctaatggctcccangctttngcattngccttgccanatagccgccatttttggnccctntctagggaaanacttaggtcttcttttacctggggcttggactcaagggncctcatcccctggagctganacactgggcttcatgc

SEQ ID NO: 1107 - DNA, 435 bp, Mus musculus
  misc_feature (1)...(435): n = A,T,C or G
actgaggaagaaaacacacgtgtgaggggctgataaaaatgtggacgacgagttgtcaggaaaaaccaacccatacccagttgttaagatagtacaaggtcgatggatagtaacttcacaatggaagaaagttggaacattacaagcttggagccaaaattatctcgggctggcttttgcccccttaaagataaagccattgactgtcctcctgtgtgcctgacccaacaccntttcacctgtctggcaaactgctggttagtttatgtcagcttgactcaaaatagtcacttggttgtgaagaggaaagagttgaggcattattttcatcagattggcctgtggaacagtttcttgactaanggacgtgaaagggtcccacagcagttggaccttgcttgtaataaagccaataagcattctcaaaaaaaaaaa

SEQ ID NO: 1108 - DNA, 182 bp, Mus musculus
gactgagatgctttcagaagtatggagctaaatgcaggagccctggagatgcccagaagcacacacgggtgaccattgcttgctgaagatgacaatgccagtctgtgtggcttctgaactctgacattatgtccccaaactataaccttacattaaagagtacacgtgggatgcttaggaac

SEQ ID NO: 1109 - DNA, 164 bp, Mus musculus
  misc_feature (1)...(164): n = A,T,C or G
ttcggaatcatctactgctgctttggctaccgctgcttcaaggcagtgatgtttctctngggtctgctgtcaggagccctggngatcttcctcctgtgccataaagagcgggngctagagacacagctgancctggaggngagcgcaggcatagcactgggcat

SEQ ID NO: 1110 - DNA, 288 bp, Mus musculus
  misc_feature (1)...(288): n = A,T,C or G
ccccagcactgataanccctggcttcncttcgggngtagggagnnttgcacnggctagatctcantattctaacccacngcncccaactgggnttggaaacccttgaagggnagccccaccaccnccgnggccaccctttttnttaactggggaccccggaagcatttattttccgggggggggnaaattccggggttccccccttcccccccccttttccttttaaataancctgnggnggttcccgcnaanccatttaaaaaaattttttgaaacccctttgggtt

SEQ ID NO: 1111 - DNA, 451 bp, Mus musculus
  misc_feature (1)...(451): n = A,T,C or G
gcgtgcatgcggtgcacagccatgcatgtaagcaaaatacctaaatattctactagaacattcgaatctttgaaagcagcaaaggaagctaagcagggacattctcctacaaaatacttgcccattgctagtcaaggttctgaaaaccaagaccgaagtcagagagtggaggagacaagacagtggtgtcctgaccagaccccggaactgaggggagccattgatgggaagatgcgctaaagtggaaagagcggctcacgtggacgaggttctcctgcctggtcgccggtactatatctgacacctggcacagcggtgctctgccgagccagcagtgggtacagccgatagcttatatctaaggcatnccctgtatgtngtcaggccaggtnccaaacnctcacaaaggcagacacatntaantattggggggttttgcttcgttatagat

SEQ ID NO: 1112 - DNA, 314 bp, Mus musculus
  misc_feature (1)...(314): n = A,T,C or G
ccctttgaattttgctagccttgggaagggaagttctgggatggnctgccttgngcggaagantgacaccannaagntgtacgccatgaanttcatgaacaaacagatgtgcntggtnccngaatgaagtgaggantgtcttcaagganctccatatcatgcanggcctggagcnccctttcctggtgaatctgtggnattcctttcaagatnnngaggacnttgttcntggaggtgganctgctactnngtggtnacctangttatcacctgcntctaaatgtccacttcctngangacacaatgaatctctt

SEQ ID NO: 1113 - DNA, 124 bp, Mus musculus
  misc_feature (1)...(124): n = A,T,C or G
aaacaataattatattgagccntgtttccaaagaaganancattntngcctccgtnnnacaagcagggtctgaggagacaaaagcagccataagaggttcanaatagaataagctttcttcagc

SEQ ID NO: 1114 - DNA, 313 bp, Mus musculus
  misc_feature (1)...(313): n = A,T,C or G
gctctgcttctccggtgttttaaactagaancngagngaaagnnactatgnaaatgaaangaaaaaacctttcgnaacccgncgcggnatcctgcccctttcggttnctcgctnctgggcgtgtacaaggcaaaaccagaacaaagctgggctggctagagccggacacgaggaaaccaattgcctgtagtgtttcattttccgcacattgggaggaactgnntcccgtcgaaacattatgtatggtctccgtgtgaaccctttngtattttgctttcgcacgtcttttggaggaagggggaaggatcgttcc

SEQ ID NO: 1115 - DNA, 375 bp, Mus musculus
  misc_feature (1)...(375): n = A,T,C or G
gactgaggggtcaagcacctgtgaaaggaanaggacgcaagcagaggaggaatgaagctggtcccacagtccgtcagccagccctggcgctgtggagtgagcactgctcttcanaggtcccgagngagtgcctgcctgcaaagtgtatgcnaagtctttgcatacaggctgncccnggaagggcataatttnggggtgggtcgggaggnggnnaagcagcagtggagaaaaccgataattntnngattataccccgggagtcttgtttgtttattatactaatcacatgtggntcttncgtgatgtctaactgagaagagaagagaagggaaggcnaagngatngttacagganttaaacttagccacagagttg

SEQ ID NO: 1116 - DNA, 425 bp, Mus musculus
  misc_feature (1)...(425): n = A,T,C or G
actgaggtcgccaagttggttgtgcattttctcaaagctgattcacgtggacgcgttctctctgtgatgtctgcgtccctgaggactttcccaaaaggcctgcggtgaaagaggacagggtcatcatcggctgccttcattgttttctagccaagcacaacaatatgcaataggagcttaacaagaagggaggagataggcccagccctcagcccagagaggatggaggatggctgctcaggagccaaccggagagtccactctgcccatcccaacatccccacagctggagcactgggtttgccaagtcagtggactggctctctctcacagctgctctgaccacagaggagaagggggctttccttggcctgaactgctggnaagctgtgggtgggaggnggcncccccagtttcctgaagca

SEQ ID NO: 1117 - DNA, 122 bp, Mus musculus
  misc_feature (1)...(122): n = A,T,C or G
gactgaggaggacctgtccctgancctcctcaggtcatccatcgtcctcgaaggatccatcctgaggcatcaactgaaaattatggctcctgagaaagaataaagcacactgttcactgcca

SEQ ID NO: 1118 - DNA, 247 bp, Mus musculus
  misc_feature (1)...(247): n = A,T,C or G
ctgaaggtccccaacaannaagcatatcgggnaggcagtatctntggaaggagcaccagtangaaagcttgcagcttggncatcccacagctttntgtgatgggctgaaggcaccagagacttccacagacaggagaaatatggcctctgcctcaagaagctggtattgacaagaagctggctggaaacaagaataaacaagtgttcagcaccttaaaataaacaggtgacatgggccatgaggaaa

SEQ ID NO: 1119 - DNA, 126 bp, Mus musculus
  misc_feature (1)...(126): n = A,T,C or G
ttttgtctaaaagatttnagcgctgctaggcccagnctgtcnttatntncaanntatgaaaaaaatacaccanttcatgagatggtttttctctactgcccatggccactaagaaatcagagcagc

SEQ ID NO: 1120 - DNA, 433 bp, Mus musculus
  misc_feature (1)...(433): n = A,T,C or G
gactgagagttgcccaggcagctgcaggccaggtgcctggagtacccccggggggctattatcctagtcctccccatggngggggccagtatggcagtggactgcccccaggtggtgnctatggagctcctgcccctggaggaccctatggataccccagtgctggaggagtcccctcggnaactccaagtggaccatatggcggtatacctccagggggtccctatggtcagctacctccagggggtccntacggtacccagcctggacattatggacaggggtccttgnaagttncacctccaaggngagggccantantgtaaaggacagagctgaccatcaaanacgctcctcngcntgctggaanatccnaaagggcctttccggnttacccactgccgtcagccctaaccttccatccagcaaattt

SEQ ID NO: 1121 - DNA, 459 bp, Mus musculus
  misc_feature (1)...(459): n = A,T,C or G
cttgggataaacccagggttncaggtaccagaggnaagtcctacatnaaccgagccacatccccagcctcnggttattnttaagtagcatnaagtcttctttccaagacagagggaaccttggtgcatctgctctatctgcggtgcatacaccctggcgtatcccagggagctgaggaagaggaacagcgctctgccggcagatgatccaacttngggaacttgatcccctgaaaaataacatttgnggcctcatgtttccccacactatgggatgtctgccctgcaagctgcccatcagtcctgcgtttccagcacccggggagcctctgctctcctctgggagttgcgtttcatcggagactcagctgggagatgagngcattaangggnctatttatcatctgctttggctggcttnatccctagggatgggngccagaggccaagggaaggagct

SEQ ID NO: 1122 - DNA, 297 bp, Mus musculus
  misc_feature (1)...(297): n = A,T,C or G
actgagggagaatgtgacacgatnaacatctccagcttgggactttctgnacggaanaatcccgttcactgtcactctgcatgggtatctgagttanatggagaccaancttctgncatgccaagtcgaattaaangcagacaggnaagtagtccctctaagaaaattctgacaggtgttactgctgtggtggggagggaaccgaaaaatgtttaagttgaacaanatttttgcacttttgnttttggactcatctgtggacagcttnttttgtgttcaaaactacctaaataaaaa

SEQ ID NO: 1123 - DNA, 220 bp, Mus musculus
  misc_feature (1)...(220): n = A,T,C or G
tggagaagactacagcctatccatcagacctaggagcctggagttatcanaaaattaancaggtttatnacctctactgcaagtngaggctgatnangttggccaatttaaaaactctaggcaccccaaaaatgcatgcctcaaatccaccaagaaccccatgtntgaactctnagacatctaaataaaacgacctggcagcttaccccaaaaaaaaaaa

SEQ ID NO: 1124 - DNA, 252 bp, Mus musculus
  misc_feature (1)...(252): n = A,T,C or G
tggctagccaccccacattcntgcctggnagaacctcgccgttactgacagctctttntggatnattactgnancaggatnttatctactgagcacctccggttgttcnnttctccacattnatgcctgntgacccnatcctgaccngnnccgaanggcttctgccttancanattacatctgtncncggncatgctttcccntgctacagcacagcctcctnaggctcttgactagccatggatgagcctg

SEQ ID NO: 1125 - DNA, 150 bp, Mus musculus
  misc_feature (1)...(150): n = A,T,C or G
ctatcggacacccctctcccttgctgaggaaagcctaccgannaagatggngccaaccanaaaagaagcagtngnnctatgactggcaggagttggttgaaatattccagttgtgttgtttgactttaaagattatacgaatatttctaa

SEQ ID NO: 1126 - DNA, 142 bp, Mus musculus
  misc_feature (1)...(142): n = A,T,C or G
tcctcttcaatgggctgnanaaaacactgtcactcaagctganccatatccctgntgttggccttccanggcctatcaanattttccccttcaagtccctacggcagctggagcttcnaggagnccctatccacagcctgtg

SEQ ID NO: 1127 - DNA, 239 bp, Mus musculus
  misc_feature (1)...(239): n = A,T,C or G
acacaaaaccgctgtgtanatgtcnnatcatcagcagagccnctgantattctcccatctgtcaaaggcnnctaacctttgnctcttacacaaaggagcctggccaggaccacaggtctgctcctcctgctgtctgaatcttgcctctacctcagactccatgagtttccagatgactgactgaggtanaagnnaggtttggatgctgtaataaaacccaacaatgatgactcatacgt

SEQ ID NO: 1128 - DNA, 308 bp, Mus musculus
  misc_feature (1)...(308): n = A,T,C or G
aaatagcgaggctcctccaattggctacagagtctacggaaatggaancngctngatgtngcaanangctgcctgaacaccaccagaatttttngatgggntncnctctatnnagtgacagatgaatgatgnccatcaaanaagagnntggcataccaataccacacngcatnntccactctgggnnggattatacttataccctttccaaatatcacattctctcaagcatctgctctagcaaaacatcacatgtcctttttccaggctgntcccaaaaaaacaccagcaaagcatcctcccacatg

SEQ ID NO: 1129 - DNA, 279 bp, Mus musculus
  misc_feature (1)...(279): n = A,T,C or G
gaggacctgggctcagcctcctatcccacctgcnggancccngtnacctgggnttacccacgccangctatcnacagccanctanattacatcgctnttgtgggaacaatctttctaacaattgtggctttnaagattnangctttacacacaanntttntcccaacctgcaaccaatgttttnttgtgtttggagatcatttatgactacacactcattctgctcacatactgnatattcagctgntcacaactaactgggttctataaaaaataaaa

SEQ ID NO: 1130 - DNA, 373 bp, Mus musculus
  misc_feature (1)...(373): n = A,T,C or G
aactgagggaacctttggagcctggaanctgnctaaaagggacacctttcanccctcccngggagactgnnctgagctcccacaaccctgcctgagcggctgtgtggctaggagtggttgtgcccaggagaccatttccaaagcaatccttcagaacactgnaggcccntccccccagagtttgtcatgtgtctggaagtggcttctggagacaaaggctcccagnacacacacaccaggatctggattggtgagacatgaaatactgagngaaggatggggctgaagtccccanattgtttangagtccgaancangggcgattgaggnggttnttgataaacacttgatactcnacatcctaaaagaggct

SEQ ID NO: 1131 - DNA, 115 bp, Mus musculus
  misc_feature (1)...(115): n = A,T,C or G
tgccagattgcagctttncatgtgtgcacatttanaaagtgatggncagaantcaccagagngancntnaacctgagacaaccaacagtganntgnggagagccaaactgaccca

SEQ ID NO: 1132 - DNA, 190 bp, Mus musculus
  misc_feature (1)...(190): n = A,T,C or G
gcatgcaaccctgaccaatcttganccaggtgatgtcctaactatggatatcatatttattgattaattgccaactgggaacccttcntaaagcaaaaaggagttcattggaacttgcctgttggcttctattgcaaatgctttccatatacagagaataaatactctctttgagactcaaaaaaaaaaa

SEQ ID NO: 1133 - DNA, 215 bp, Mus musculus
  misc_feature (1)...(215): n = A,T,C or G
ggatcgcccctggagctgaggctccaccagcagncatgggcgcctgnactggncccaagcctggctatngngcctgcccatagtatgggncgaacagnttanttggccctattcacctccatcntgcncantgtntataatgatgtactacatgnacaccttcgtactcantgaataaaataaataaagtgtccttctgggttggagagactgta

SEQ ID NO: 1134 - DNA, 390 bp, Mus musculus
  misc_feature (1)...(390): n = A,T,C or G
actgagactcctcacaacacactgcctatgntttattaattacgcacanantctccggtaagccggncccttttcctctcagtactcacnatgggaggacagntttgcanaaaggacatcatccanctaatngccgaacttngtggatcccaatccaagatttccctanaanctcatggagacgagttatagncatgacgtctaaagttgnntctaaaanaattctcaaatctttaaaatcagtatctgtaaaanaaccggtaatatcactgaaacttcacaacccgtctcagagaaggtccccaataaaagcgtggtacaccgttaaccacagcatcaccaagtcagaattataataaaaacacacctgtacctgctgaaaaaaaaaaa

SEQ ID NO: 1135 - DNA, 305 bp, Mus musculus
  misc_feature (1)...(305): n = A,T,C or G
gcagcaggcctaattnctangctgcgnacatctgctggacgtnaggnanagtngcngntgcttatactgaaactgtanccttctgatctacccacagatggttccacagaccctggacagccaattctgctaagactagaccaacattcccaacattcccatacccattttcctaggtatcctagagacacgtcaccccaaagtcagctaaagatcgctatgaccatattcctgctccgccatcacctctttctatttttttcttttttaattaaaccgaaanggggnaatgttggcaaaaaaaa

SEQ ID NO: 1136 - DNA, 111 bp, Mus musculus
  misc_feature (1)...(111): n = A,T,C or G
actgactaaagccctancnaaagtgtagaaagccagcatttaaangcgntnttnnctancatnnaaaaggaaataatggncgtggagccaacaactcaataggaaatgaaa

SEQ ID NO: 1137 - DNA, 361 bp, Mus musculus
  misc_feature (1)...(361): n = A,T,C or G
gactgaggagagatgaagaaccacagcatgaaaatctaccagaagacaacattttcgtcccgaatgaagagtcgctcacaccttggccagctagcttttttcgctgacgcaggcagctcctcctatgaacgtctggggctagatcccactcttattctcaggctgacagaaggtgnagacgnaccnangcnggganncgntttgatnannaaccaggnnnaaagggntcanntgaaggggganttngnggncantnnctcccgtagagaangcaagccatgaggctggagagacggnttantcaagagccctttgcgactcttgcagaanaccaggggtngggtcccagcatcctcaacag

SEQ ID NO: 1138 - DNA, 299 bp, Mus musculus
  misc_feature (1)...(299): n = A,T,C or G
ggtcagcatccccgcccaggcttcaaccaggttccctcccaggtccaacgcctacctgattatagggntgcnaaangagctgaccaanngtgggatcttgaanaacntgaccagacgacgaggatttttggaaactggttcnggaggaanctntnggagngngaactannnaaaagntccaaaagataanacttnggtngangaatnccaggccctggccaccanctgnttccagganatgggagaccgngangctggtcaccagtgannaagacagtggggcccgccggggaacacac

SEQ ID NO: 1139 - DNA, 124 bp, Mus musculus
cagagactcccaggggtatgggcagaacccagccccacagaactggtccaaccccaagctcctaaattgttcaactaacaagttcagctatatctgtcatgattaaacaatacccaatgacctc

SEQ ID NO: 1140 - DNA, 328 bp, Mus musculus
  misc_feature (1)...(328): n = A,T,C or G
gactgaggaagaaaaagggaagaaaaccagaagaaagagagaaacagaagaatgaaagcggcgaaggggcatcggcgccttgagctacctcactgcatcacaatgaatatggactctattaagctccgttctgcctgttagtgtctcccggggcaacacagcccccatatggcaagcatgcagcanattagggtaggcccccaggccgcatggaaggccaggggcttgactggcagttgaacccccctcccttcccccgtttctcctcacacttgacactgcctgtgtttatctaaagcaaggagggtggggggagttggaaggtttt

SEQ ID NO: 1141 - DNA, 435 bp, Mus musculus
  misc_feature (1)...(435): n = A,T,C or G
gactgagcccaggagctaagaggattgattacaagtagngctttcgtnatctgtcctaaccctgggaaacaggcactttaaccatcaacttttctggcacacagacttcctgtatttggtgacttgttttgaacttcggcaagaaagaaggaaagcccatggnatcttccaaagctcaagaggcaactctnactttccttttgtctaaggccttanagttnaaatgctatcatctggttggaagagaataataacagggcacccctcaagggctgatgggtgaggcccgntgnantcaatacaggcgaagnaagagtgctcagcagagcatctgtaagtacacagtacacagcaggcatccttgtctctgggggtagcacactngggaggaaatcagagncatttatgcagaatacagncacttcccagcagagg

SEQ ID NO: 1142 - DNA, 420 bp, Mus musculus
  misc_feature (1)...(420): n = A,T,C or G
ggctcactgtgtgtggngcntagcatgaccaganttnaactcnttcccagncagaancctccgctctgtctgccatcccagcanatcccncanaaanatgngaggcnaganacggaagaatcccctgggagcttgaagggctgctagcttggaatacacagcacggtggacacaagagagacccatcctcancatgggggaaagagagagtcaactccccacagtggttctctgacctccatacaactgcccacacacagccgtacagtggagaggatctgggctgggacagctcaatgcctggcagcaggagctggggtgaaacttacacctcactgaatcaggangcagtgtgcttaggtaagaaatgagagagaccctannaagccaccttgttctacaatctataaataaataaat

SEQ ID NO: 1143 - DNA, 189 bp, Mus musculus
  misc_feature (1)...(189): n = A,T,C or G
gactgagattctacaaggcacccaggtggtaaaggatgacctcataaaagcagaccgagctccgagaaatatcctctatgtgtgaaagaagtagtgagggaggcatctttaatgaaggcattctctgcanaggactggaagctggagctgaaggacaatcctgtgggaaaactgaacctccttgctgca

SEQ ID NO: 1144 - DNA, 219 bp, Mus musculus
  misc_feature (1)...(219): n = A,T,C or G
tgcctggccatcctggatcttnctgtgnngaccaggctagcctccaactctcagagagctgccggacatgagccatgctaactggctcttctgttatatgcagacaagncttcttgngttaaagagtttgtttttattttgtgnatataaatgccatactgcannggaaanggcganccatctatcatgnnggatncacaccatgctgtgtgactatga

SEQ ID NO: 1145 - DNA, 307 bp, Mus musculus
aaagcaggatgcagccatttccccaaaccactgcatggggtgtggagcacattcaagctggttcctttctctcaaggctcagagccagaagagactgctctcacaggcttggtctcaggcgggcagaagcgacctcctcctacttccattccctccctccggtatctttcactcaggacatcacaatccaagaagtcttgatgactctgacagatgtctggtctgaccagaagagaaactgggaataatcatgcttgctacttgctacctatgccattttgagaggaaagagggacatctgagccat

SEQ ID NO: 1146 - DNA, 273 bp, Mus musculus
  misc_feature (1)...(273): n = A,T,C or G
agactgccgagtgccntgatgtagacgaagancgaaactgancatcanngnctatgtanagngcacggacgcnggnaggcggtnctatttcaccaccgccacctcccccatnnagattggaggttcaccttaaatgcttagtatgcanagctgggacttatctcagtgatggaagtgtttgcctggcatgggtgcgntgntatctccaggactggggaaaaaanaaggtgancccttnttantccctgcnaaaaccntgaaacgttcttgctt

SEQ ID NO: 1147 - DNA, 371 bp, Mus musculus
  misc_feature (1)...(371): n = A,T,C or G
gactgaggcactgggctccctctgctccccgtgggccgctccccgcgtggggccactgcccttggcccccgccatggtgcggatttcaaagcccaagacgtttcaggcctacttggatgactgtcaccggaggtatagctgtgcccactgccgngctcacctggccaaccacgacgacctcatctccaagnccttncagggcangcagggacgngcctacctnttnanntctgtantgantgngngctgcggcccacnaaaanagcgggngctgctganaggccttcntgcngacnntgacanncacngtganaacngnncnaccactttgggcnggaaatatnagcatgcctttgagagcagccagaagt

SEQ ID NO: 1148 - DNA, 344 bp, Mus musculus
  misc_feature (1)...(344): n = A,T,C or G
tcctcaccctaaccacacagnngggctgagaatcctcataagctgagaaacataagcagaaaaggtgcagcaccgtctagcctgggagtcctcaatgggaacggcgatggagaccccagaaggagagttttgaagatgacaggggcctcggtcacggtgcagccatgagaatgagaaggccaagcttctgcagcctctgtatgaaggagatcagnggcaacctgaccagcagcctgggaagttccagaggatgagagcctctttcctgaatgctatcgagcttcctttgtgttagacactcatcgttctgngatctactcattattgaagcctcggccaactga

SEQ ID NO: 1149 - DNA, 312 bp, Mus musculus
  misc_feature (1)...(312): n = A,T,C or G
gggcaggctgccagcaggagcatggccatnagcccaggctanagaacctgagancacaggggcncggccagggnggaccaaggctacngcatntacccagcatgcncagggnccttnagtggnngngcggagagncctttgctctngtgngatancantgnccnttgtnggaaatgggtgtnctatgactatgccacgcctgaagacttaaagctttgtgtgctgcagcatgcctgtaatcccactctttagaatcttagatttataactaaaatgaggagtcatcttcatattgttgcaaagcaaaaaaaa

SEQ ID NO: 1150 - DNA, 146 bp, Mus musculus
  misc_feature (1)...(146): n = A,T,C or G
gtgaagtgcacgggacctnagcngttctgccttttccctccacacgcacctcccagaacccngaacatngncctcctgctctgcctcactttaatccttattacattaattngtgtttcagaggacacatggcacacaaaaaaaaa

SEQ ID NO: 1151 - DNA, 207 bp, Mus musculus
  misc_feature (1)...(207): n = A,T,C or G
gattgggctgaggcctngccggggcgagggccatanttacttcttgtggaactctcagcggangcccagacagnntggccttgttacattgtgcctgaaacaaaagaggaggcgatggcattttgcttgcaccttggatttattttgcttgttatgttttatgcagtctgaaatagattctgngttgttggaacagtaaaaaaaaaa

SEQ ID NO: 1152 - DNA, 229 bp, Mus musculus
  misc_feature (1)...(229): n = A,T,C or G
tgtcattccagaaggcatccggaggttgtntggcctganaaattcccaaaggttgngctggcnngccagggcagcagacaattcctggaatctacccagnggaaggggagaactgacttctaaatgttgncctctgatttctttccacatacatgcagcccatccacaaataagttaaattaaaacattgaaatagaaattatanaaggtctatttatcaaaaaaaaaa

SEQ ID NO: 1153 - DNA, 124 bp, Mus musculus
  misc_feature (1)...(124): n = A,T,C or G
gactgaggtgaagtggggtcatgaatggagnctgtgagcagccctacctcacagaaggagctcatgaagagaaatcgcaccatcaggcgaatcagcaaataaacataccactaaaataaaaaaa

SEQ ID NO: 1154 - DNA, 178 bp, Mus musculus
  misc_feature (1)...(178): n = A,T,C or G
gactgaggagtaagtaagccggaagggtcgctgcaaatttaaggccagtaggctccttacggcaagttcaccgcaaaaggtccctgacgccccagtaccctggtggatgcagagggaagaggattaattcttggctgaactggaggattgtctagttttncagctgaaaaataaaaaa

SEQ ID NO: 1155 - DNA, 107 bp, Mus musculus
  misc_feature (1)...(107): n = A,T,C or G
gacctgagttcatgcagactccaggacacacgnggtgnacggantgancctattcngnncttctgnggacctctggcccagcccactgaataaacgcatacttgtct

SEQ ID NO: 1156 - DNA, 163 bp, Mus musculus
  misc_feature (1)...(163): n = A,T,C or G
ctctcaaaggtcggacagganctaaggntgangnnanacatgctgcagcctacnggccccccttcaaganacgtntgcagccgtaagccangtccagccngctgcacganataacacagcctgcagagaaaagactttcggcttaattgagaaacacccacac

SEQ ID NO: 1157 - DNA, 117 bp, Mus musculus
  misc_feature (1)...(117): n = A,T,C or G
gaagcattctttcatagaaatggntncatcaagaanatctggagaanggtagcatcantaccncatgctantgcnaaagggggaangaanacctcatgggaacccacccctagacaa

SEQ ID NO: 1158 - DNA, 139 bp, Mus musculus
  misc_feature (1)...(139): n = A,T,C or G
tgggtggttctttaccgcngaaccatctatccnggcccccttctttagagtttaaaccctgatcaaacttaagtttacttcctgatctatttgggtacatgtttatcatcaggtgctcaaatgaaaaaggaagaagaaa

SEQ ID NO: 1159 - DNA, 279 bp, Mus musculus
  misc_feature (1)...(279): n = A,T,C or G
tgagaagttcattgtccctaaaatcaagaagaaccaattgggagccagcactccttcaaggccccaagcagaagctgccctacctaccacagccagaagtattgctggggtatatgtggaggcctcggggcagacccagagcatctatgctgctataaagcagggcctcctgcccactgggcttggactgactttgcttgaggcccaggcagccactgggggcctcgtggaccttgnccagggccagcttnttcctgngtntgaggccctaaggcgggg

What is claimed is:

1. An isolated polynucleotide comprising a contiguous stretch of at least about 60 nucleotides first disclosed in at least one of SEQ ID NOS: 1-1,159.

2. An isolated polynucleotide according to claim 1, wherein said polynucleotide sequence comprises at least one of SEQ ID NOS: 1-1,159.

3. An in vitro process for producing an isolated polynucleotide incorporating a sequence capable of hybridizing to a sequence first disclosed in one of SEQ ID NOS: 1-1,159, comprising the steps of:
a) obtaining a polynucleotide template encoding a sequence capable of hybridizing to an GTS of SEQ ID NOS: 1-1,159;
b) contacting said template with a polynucleotide probe comprising at least about 25 contiguous bases first disclosed in SEQ ID NOS: 1-1,159;
c) processing the combined probe and template to allow the specific detection of the combined probe and template; and
d) isolating a clone encoding said template.

4. The process of claim 3 wherein said template is mammalian cDNA.

5. The process of claim 3 wherein said template is mammalian genomic DNA.

6. A process according to claim 4 wherein said template is of human origin.

7. A process for identifying novel polynucleotide sequences comprising the steps of:
a) retrieving a computer readable representation of a polynucleotide sequence first disclosed in at least one of SEQ ID NOS: 1-1,159, or an amino acid sequence encoded thereby, from a computer addressable form of electronic data storage medium;
b) retrieving a computer readable representation of a test polynucleotide or polypeptide sequence from a computer addressable form of electronic data storage medium; and
c) comparing the sequence of said test polynucleotide or polypeptide sequence to a sequence first disclosed in at least one of SEQ ID NOS: 1-1,159, or an amino acid sequence encoded thereby.

8. An isolated murine embryonic stem cell line comprising an engineered retroviral gene trap vector in at least one gene comprising a polynucleotide sequence first disclosed in one of SEQ ID NOS: 1-1,159.

9. The use of an mutated mouse comprising a gene trapped allele from claim 8, to produce a high affinity antibody against a human protein ortholog or homolog of any one of SEQ ID NOS:1-1,159.
